(19) United States
(12) Patent Application Publication
(10) Pub. No.: US 2003/0219793 A1
(43) Pub. Date: Nov. 27, 2003

(54) High bone mass gene of 11q13.3

(76) Inventors: John P. Carulli, Southboro, MA (US); Robert R. Recker, Omaha, NE (US); Mark L. Johnson, Omaha, NE (US); Randall D. Little, Newtonville, MA (US)

Correspondence Address: Estelle J. Tsevdos, Esq., KENYON & KENYON, One Broadway, New York, NY, 10004, US

(21) Appl. No.: 10/374,979

(22) Filed: Feb. 28, 2003

Related U.S. Application Data
(63) Continuation of application No. 10/240,851, filed on Oct. 4, 2002.
Application No. 10/240,851 is a 371 of international application No. PCT/US00/16951, filed on Jun. 21, 2000.
Application No. 10/240,851 is a 371 of international application No. 09/578,900, filed on May 26, 2000.

(51) Int. Cl. C12Q 1/68; C07H 21/04; C12N 9/64; C12P 21/02; C12N 5/06; C07K 16/40

(52) U.S. Cl. 435/6; 435/69.1; 435/226; 435/320.1; 435/325; 536/23.2; 530/388.26

(57) ABSTRACT

The present invention relates to methods and materials used to isolate and detect a high bone mass gene and a corresponding wild-type gene, and mutants thereof. The present invention also relates to the high bone mass gene, the corresponding wild-type gene, and mutants thereof. The genes identified in the present invention are implicated in bone development and in focal adhesion signaling. The invention also provides nucleic acids, including coding sequences, oligonucleotide primers and probes, proteins, cloning vectors, expression vectors, transformed hosts, methods of developing pharmaceutical compositions, methods of identifying molecules involved in bone development, and methods of diagnosing and treating diseases involved in bone development. In preferred embodiments, the present invention is directed to methods for treating, diagnosing and preventing osteoporosis.

### FIELD OF THE INVENTION

[0001] The present invention relates generally to the field of genetics, genomics and molecular biology. More particularly, the invention relates to methods and materials used to isolate, detect and sequence a high bone mass gene and corresponding wild-type gene, and mutants thereof. The present invention also relates to the high bone mass gene, the corresponding wild-type gene, and mutants thereof. The genes identified in the present invention are implicated in the ontology and physiology of bone development. The invention also provides nucleic acids, proteins, cloning vectors, expression vectors, transformed hosts, methods of developing pharmaceutical compositions, methods of identifying molecules involved in bone development, and methods of diagnosing and treating diseases involved in bone development. In preferred embodiments, the present invention is directed to methods for treating, diagnosing, preventing and screening for normal and abnormal conditions of bone, including metabolic bone diseases such as osteoporosis.

### BACKGROUND OF THE INVENTION

[0002] Two of the most common types of osteoporosis are postmenopausal and senile osteoporosis. Osteoporosis affects men as well as women, and, taken with other abnormalities of bone, presents an ever-increasing health risk for an aging population. The most common type of osteoporosis is that associated with menopause. Most women lose between 20-60% of the bone mass in the trabecular compartment of the bone within 3-6 years after the cessation of menses. This rapid loss is generally associated with an increase of bone resorption and formation. However, the resorptive cycle is more dominant and the result is a net loss of bone mass. Osteoporosis is a common and serious disease among postmenopausal women. There are an estimated 25 million women in the United States alone who are afflicted with this disease. The results of osteoporosis are both personally harmful, and also account for a large economic loss due to its chronicity and the need for extensive and long-term support (hospitalization and nursing home care) from the disease sequelae. This is especially true in more elderly patients. Additionally, while osteoporosis is generally not thought of as a life-threatening condition, a 20-30% mortality rate is related to hip fractures in elderly women. A large percentage of this mortality rate can be directly associated with postmenopausal osteoporosis.

[0003] The most vulnerable tissue in the bone to the effects of postmenopausal osteoporosis is the trabecular bone. This tissue is often referred to as spongy bone and is particularly concentrated near the ends of the bone near the joints and in the vertebrae of the spine. The trabecular tissue is characterized by small structures which inter-connect with each other as well as the more solid and dense cortical tissue which makes up the outer surface and central shaft of the bone. This crisscross network of trabeculae gives lateral support to the outer cortical structure and is critical to the biomechanical strength of the overall structure. In postmenopausal osteoporosis, it is primarily the net resorption and loss of the trabeculae which lead to the failure and fracture of the bone. In light of the loss of the trabeculae in postmenopausal women, it is not surprising that the most common fractures are those associated with bones which are highly dependent on trabecular support, e.g., the vertebrae, the neck of the femur, and the forearm. Indeed, hip fracture, Colle's fractures, and vertebral crush fractures are indicative of postmenopausal osteoporosis.

[0004] One of the earliest generally accepted methods for treatment of postmenopausal osteoporosis was estrogen replacement therapy. Although this therapy frequently is successful, patient compliance is low, primarily due to the undesirable side-effects of chronic estrogen treatment. Frequently cited side-effects of estrogen replacement therapy include reinitiation of menses, bloating, depression, and fear of breast or uterine cancer. In order to limit the known threat of uterine cancer in those women who have not undergone a hysterectomy, a protocol of estrogen and progestin cyclic therapy is often employed. This protocol is similar to that which is used in birth control regimens, and often is not tolerated by women because of the side-effects characteristic of progestin. More recently, certain antiestrogens, originally developed for the treatment of breast cancer, have been shown in experimental models of postmenopausal osteoporosis to be efficacious. Among these agents is raloxifene (See, U.S. Pat. No. 5,393,763, and Black et al, J. Clin. Invest., 93:63-69 (1994)). In addition, tamoxifene, a widely used clinical agent for the treatment of breast cancer, has been shown to increase bone mineral density in post menopausal women suffering from breast cancer (Love et al, N. Engl. J. Med., 326:852-856 (1992)).

[0005] Another therapy for the treatment of postmenopausal osteoporosis is the use of calcitonin. Calcitonin is a naturally occurring peptide which inhibits bone resorption and has been approved for this use in many countries (Overgaard et al, Br. Med. J, 305:556-561 (1992)). The use of calcitonin has been somewhat limited, however. Its effects are very modest in increasing bone mineral density and the treatment is very expensive. Another therapy for the treatment of postmenopausal osteoporosisis the use of bis-phosphonates. These compounds were originally developed for use in Paget's disease and malignant hypercalcemia. They have been shown to inhibit bone resorption. Alendronate, one compound of this class, has been approved for the treatment of postmenopausal osteoporosis. These agents may be helpful in the treatment of osteoporosis, but these agents also have potential liabilities which include osteomalacia, extremely long half-life in bone (greater than 2 years), and possible “frozen bone syndrome,” e.g., the cessation of normal bone remodeling.

[0006] Senile osteoporosis is similar to postmenopausal osteoporosis in that it is marked by the loss of bone mineral density and resulting increase in fracture rate, morbidity, and associated mortality. Generally, it occurs in later life, i.e., after 70 years of age. Historically, senile osteoporosis has been more common in females, but with the advent of a more elderly male population, this disease is becoming a major factor in the health of both sexes. It is not clear what, if any, role hormones such as testosterone or estrogen have in this disease, and its etiology remains obscure. Treatment of this disease has not been very satisfactory. Hormone therapy, estrogen in women and testosterone in men, has shown equivocal results; calcitonin and bis-phosphonates may be of some utility.

[0007] The peak mass of the skeleton at maturity is largely under genetic control. Twin studies have shown that the variance in bone mass between adult monozygotic twins is smaller than between dizygotic twins (Slemenda et al, J. Bone Miner. Res., 6:561-567 (1991); Young et al, J. Bone Miner. Res., 6:561-567 (1995); Pocock et al, J. Clin. Invest., 80:706-710 (1987); Kelly et al, J. Bone Miner. Res., 8:11-17 (1993)), and it has been estimated that up to 60% or more of the variance in skeletal mass is inherited (Krall et al, J. Bone Miner. Res., 10:S367 (1993)). Peak skeletal mass is the most powerful determinant of bone mass in elderly years (Hui et al, Ann. Int. Med., 111:355-361 (1989)), even though the rate of age-related bone loss in adult and later life is also a strong determinant (Hui et al, Osteoporosis Int., 1:30-34 (1995)). Since bone mass is the principal measurable determinant of fracture risk, the inherited peak skeletal mass achieved at maturity is an important determinant of an individual's risk of fracture later in life. Thus, study of the genetic basis of bone mass is of considerable interest in the etiology of fractures due to osteoporosis.

[0008] Recently, a strong interest in the genetic control of peak bone mass has developed in the field of osteoporosis. The interest has focused mainly on candidate genes with suitable polymorphisms to test for association with variation in bone mass within the normal range, or has focused on examination of genes and gene loci associated with low bone mass in the range found in patients with osteoporosis. The vitamin D receptor locus (VDR) (Morrison et al, Nature, 367:284-287 (1994)), PTH gene (Howard et al, J. Clin. Endocrinol. Metab., 80:2800-2805 (1995); Johnson et al, J. Bone Miner. Res., 8:11-17 (1995); Gong et al, J. Bone Miner. Res., 10:S462 ((1995)) and the estrogen receptor gene (Hosoi et al, J. Bone Miner. Res., 10:S170 (1995); Morrison et al, Nature, 367:284-287 (1994)) have figured most prominently in this work. These studies are difficult because bone mass (the phenotype) is a continuous, quantitative, polygenic trait, and is confounded by environmental factors such as nutrition, co-morbid disease, age, physical activity, and other factors. Also, this type of study design requires large numbers of subjects. In particular, the results of VDR studies to date have been confusing and contradictory (Garnero et al, J. Bone Miner. Res., 10: 1283-1288 (1995); Eisman et al, J. Bone. Miner. Res., 10:1289-1293 (1995); Peacock, J. Bone Miner. Res., 10:1294-1297 (1995)). Furthermore, the work thus far has not shed much light on the mechanism(s) whereby the genetic influences might exert their effect on bone mass.

[0009] While it is well known that peak bone mass is largely determined by genetic rather than environmental factors, studies to determine the gene loci (and ultimately the genes) linked to variation in bone mass are difficult and expensive. Study designs which utilize the power of linkage analysis, e.g., sib-pair or extended family, are generally more informative than simple association studies, although the latter do have value. However, genetic linkage studies involving bone mass are hampered by two major problems. The first problem is the phenotype, as discussed briefly above. Bone mass is a continuous, quantitative trait, and establishing a discrete phenotype is difficult. Each anatomical site for measurement maybe influenced by several genes, many of which may be different from site to site. The second problem is the age component of the phenotype. By the time an individual can be identified as having low bone mass, there is a high probability that their parents or other members of prior generations will be deceased and therefore unavailable for study, and younger generations may not have even reached peak bone mass, making their phenotyping uncertain for genetic analysis.

[0010] Regardless, linkage analysis can be used to find the location of a gene causing a hereditary “disorder” and does not require any knowledge of the biochemical nature of the disorder, i.e., a mutated protein that is believed to cause the disorder does not need to be known. Traditional approaches depend on assumptions concerning the disease process that might implicate a known protein as a candidate to be evaluated. The genetic localization approach using linkage analysis can be used to first find the general chromosomal region in which the defective gene is located and then to gradually reduce the size of the region in order to determine the location of the specific mutated gene as precisely as possible. After the gene itself is discovered within the candidate region, the messenger RNA and the protein are identified and, along with the DNA, are checked for mutations.

[0011] The genetic localization approach has practical implications since the location of the disease can be used for prenatal diagnosis even before the altered gene that causes the disease is found. Linkage analysis can enable families, even many of those that do not have a sick child, to know whether they are carriers of a disease gene and to evaluate the condition of an unborn child through molecular diagnosis. The transmission of a disease within families, then, can be used to find the defective gene. As used herein, reference to “high bone mass” (HBM) is analogous to reference to a disease state, although from a practical standpoint high bone mass can actually help a subject avoid the disease known as osteoporosis.

[0012] Linkage analysis is possible because of the nature of inheritance of chromosomes from parents to offspring. During meiosis, the two parental homologues pair to guide their proper separation to daughter cells. While they are lined up and paired, the two homologues exchange pieces of the chromosomes, in an event called “crossing over” or “recombination.” The resulting chromosomes are chimeric, that is, they contain parts that originate from both parental homologues. The closer together two sequences are on the chromosome, the less likely that a recombination event will occur between them, and the more closely linked they are. In a linkage analysis experiment, two positions on the chromosomes are followed from one generation to the next to determine the frequency of recombination between them. In a study of an inherited disease, one of the chromosomal positions is marked by the disease gene or its normal counterpart, i.e., the inheritance of the chromosomal region can be determined by examining whether the individual displays symptoms of the disorder or not. The other position is marked by a DNA sequence that shows natural variation in the population such that the two homologues can be distinguished based on the copy of the “marker” sequence that they possess. In every family, the inheritance of the genetic marker sequence is compared to the inheritance of the disease state. If, within a family carrying an autosomal dominant disorder such as high bone mass, every affected individual carries the same form of the marker and all the unaffected individuals carry at least one different form of the marker, there is a great probability that the disease gene and the marker are located close to each other. In this way, chromosomes may be systematically checked with known markers and compared to the disease state. The data obtained from the different families is combined, and analyzed together by a computer using statistical methods. The result is information indicating the probability of linkage between the genetic marker and the disease allowing different distances between them. A positive result can mean that the disease is very close to the marker, while a negative result indicates that it is far away on that chromosome, or on an entirely different chromosome.

[0013] Linkage analysis is performed by typing all members of the affected family at a given marker locus and evaluating the co-inheritance of a particular disease state with the marker probe, thereby determining how often the two of them are co-inherited. The recombination frequency can be used as a measure of the genetic distance between two gene loci. A recombination frequency of 1% is equivalent to 1 map unit, or 1 centiMorgan (cM), which is roughly equivalent to 1,000 kb of DNA. This relationship holds up to frequencies of about 20% or 20 cM.

[0014] The entire human genome is 3,300 cM long. In order to find an unknown disease gene within 5-10 cM of a marker locus, the whole human genome can be searched with roughly 330 informative marker loci spaced at approximately 10 cM intervals (Botstein et al, Am. J. Hum. Genet., 32:314-331 (1980)). The reliability of linkage results is established by using a number of statistical methods. The method most commonly used for the analysis of linkage in humans is the LOD score method (Morton, Prog. Clin. Biol. Res., 147:245-265 (1984), Morton et al, Am. J. Hum. Genet., 38:868-883 (1986)) which was incorporated into the computer program LIPED by Ott, Am. J. Hum. Genet., 28:528-529 (1976). LOD scores are the logarithm of the ratio of the likelihood that two loci are linked at a given distance to that they are not linked (>50 cM apart). The advantage of using logarithmic values is that they can be summed among families with the same disease. This becomes necessary given the relatively small size of human families.

[0015] By convention, a total LOD score greater than +3.0 (that is, odds of linkage at the specified recombination frequency being 1000 times greater than odds of no linkage) is considered to be significant evidence for linkage at that particular recombination frequency. A total LOD score of less than −2.0 (that is, odds of no linkage being 100 times greater than odds of linkage at the specified frequency) is considered to be strong evidence that the two loci under consideration are not linked at that particular recombination frequency. Until recently, most linkage analyses have been performed on the basis of two-point data, which is the relationship between the disorder under consideration and a particular genetic marker. However, as a result of the rapid advances in mapping the human genome over the last few years, and concomitant improvements in computer methodology, it has become feasible to carry out linkage analyses using multi-point data. Multi-point analysis provide a simultaneous analysis of linkage between the disease and several linked genetic markers, when the recombination distance among the markers is known.

[0016] Multi-point analysis is advantageous for two reasons. First, the informativeness of the pedigree is usually increased. Each pedigree has a certain amount of potential information, dependent on the number of parents heterozygous for the marker loci and the number of affected individuals in the family. However, few markers are sufficiently polymorphic as to be informative in all those individuals. If multiple markers are considered simultaneously, then the probability of an individual being heterozygous for at least one of the markers is greatly increased. Second, an indication of the position of the disease gene among the markers may be determined. This allows identification of flanking markers, and thus eventually allows isolation of a small region in which the disease gene resides. Lathrop et al, Proc. Natl. Acad. Sci. USA, 81:3443-3446 (1984) have written the most widely used computer package, LINKAGE, for multi-point analysis.

[0017] There is a need in the art for identifying the gene associated with a high bone mass phenotype. The present invention is directed to this, as well as other, important ends.

### SUMMARY OF THE INVENTION

[0018] The present invention describes the Zmax1 gene and the HBM gene on chromosome 11q13.3 by genetic linkage and mutation analysis. The use of additional genetic markers linked to the genes has aided this discovery. By using linkage analysis and mutation analysis, persons predisposed to HBM may be readily identified. Cloning methods using Bacterial Artificial Chromosomes have enabled the inventors to focus on the chromosome region of 11q13.3 and to accelerate the sequencing of the autosomal dominant gene. In addition, the invention identifies the Zmax1 gene and the HBM gene, and identifies the guanine-to-thymine polymorphism mutation at position 582 in the Zmax1 gene that produces the HBM gene and the HBM phenotype.

[0019] The present invention identifies the Zmax1 gene and the HBM gene, which can be used to determine if people are predisposed to HBM and, therefore, not susceptible to diseases characterized by reduced bone density, including, for example, osteoporosis, or are predisposed and susceptible to diseases characterized by abnormally high bone density, such as, for example, osteoporosis. Older individuals carrying the HBM gene express the HBM protein, and, therefore, do not develop osteoporosis. In other words, the HBM gene is a suppressor of osteoporosis. This in vivo observation is a strong evidence that treatment of normal individuals with the HBM gene or protein, or fragments thereof, will ameliorate osteoporosis.

[0020] Moreover, such treatment will be indicated in the treatment of bone lesions, particularly bone fractures, for bone remodeling in the healing of such lesions. For example, persons predisposed to or suffering from stress fractures (i.e., the accumulation of stress-induced microfractures, eventually resulting in a true fracture through the bone cortex) may be identified and/or treated by means of the invention. Moreover, the methods and compositions of the invention will be of use in the treatment of secondary osteoporosis, where the course of therapy involves bone remodeling, such as endocrine conditions accompanying corticosteroid administration, hyperthyroidism, hypogonadism, hematologic malignancies, malabsorption and alcoholism, as well as disorders associated with vitamin D and/or phosphate metabolism, such as osteomalacia and rickets, and diseases characterized by abnormal or disordered bone remodeling, such as Paget's disease, and in neoplasms of bone, which may be benign or malignant.

[0021] In various embodiments, the present invention is directed to nucleic acids, proteins, vectors, and transformed hosts of HBM and Zmax1.

[0022] Additionally, the present invention is directed to applications of the above embodiments of the invention including, for example, gene therapy, pharmaceutical development, and diagnostic assays for bone development disorders. In preferred embodiments, the present invention is directed to methods for treating, diagnosing, preventing and screening for osteoporosis.

[0023] These and other aspects of the present invention are described in more detail below.

### BRIEF DESCRIPTION OF THE FIGURES

[0024] FIGS. 1A and 1B show the pedigree of the individuals used in the genetic linkage studies. Under each individual is an ID number, the z-score for spinal BMD, and the allele calls for the critical markers on chromosome 11. Solid symbols represent “affected” individuals. Symbols containing “N” are “unaffected” individuals. DNA from 37 individuals was genotyped. Question marks denote unknown genotypes or individuals who were not genotyped.

[0025] FIGS. 2A and 2B depict the BAC/STS content physical map of the HBM region in 11q13.3. STS markers derived from genes, ESTs, microsatellites, random sequences, and BAC endsequences are denoted above the long horizontal line. For markers that are present in GDB the same nomenclature has been used. Locus names (D11S####) are listed in parentheses after the primary name if available. STSs derived from BAC endsequences are listed with the BAC name first followed by L or R for the left and right end of the clone, respectively. The two large arrows indicate the genetic markers that define the HBM critical region. The horizontal lines below the STSs indicate BAC clones identified by PCR-based screening of a nine-fold coverage BAC library. Open circles indicate that the marker did not amplify the corresponding BAC library address during library screening. Clone names use the following convention: B for BAC, the plate, row and column address, followed by -H indicating the HBM project (i.e., B36F16-H).

[0026] FIGS. 3A-3F show the genomic structure of Zmax1 with flanking intron sequences. Translation is initiated by the underlined “ATG” in exon 1. The site of the polymorphism in the HBM gene is in exon 3 and is represented by the underlined “G,” whereby this nucleotide is a “T” in the HBM gene. The 3′ untranslated region of the mRNA is underlined within exon 23 (exon 1, SEQ ID NO:40; exon 2, SEQ ID NO:41; exon 3, SEQ ID NO:42; exon 4, SEQ ID NO:43; exon 5, SEQ ID NO:44; exon 6, SEQ ID NO:45; exon 7, SEQ ID NO:46; exon 8, SEQ ID NO:47; exon 9, SEQ ID NO:48; exon 10, SEQ ID NO:49; exon 11, SEQ ID NO:50; exon 12, SEQ ID NO:51; exon 13, SEQ ID NO:52; exon 14, SEQ ID _NO:53; exon 15, SEQ ID NO:54; exon 16, SEQ ID NO:55; exon 17, SEQ ID NO:56; exon 18, SEQ ID NO:57; exon 19, SEQ ID NO:58; exon 20, SEQ ID NO:59; exon 21, SEQ ID NO:60; exon 22, SEQ ID NO:61; and exon 23; SEQ ID NO:62).

[0027] FIG. 4 shows the domain organization of Zmax1, including the YWTD spacers, the extracellular attachment site, the binding site for LDL and calcium, the cysteine-rich growth factor repeats, the transmembrane region, the ideal PEST region with the CK-II phosphorylation site and the internalization domain. FIG. 4 also shows the site of the glycine to valine change that occurs in the HBM protein. The signal peptide is located at amino acids 1-22, the extracellular domain is located at amino acids 23-1385, the transmembrane segment is located at amino acids 1386-1413, and the cytoplasmic domain is located at amino acids 1414-1615.

[0028] FIG. 5 is a schematic illustration of the BAC contigs B527D12 and B200E21 in relation to the HBM gene.

[0029] FIGS. 6A-6J are the nucleotide and amino acid sequences of the wild-type gene, Zmax1. The location for the base pair substitution at nucleotide 582, a guanine to thymine, is underlined. This allelic variant is the HBM gene. The HBM gene encodes for a protein with an amino acid substitution of glycine to valine at position 171. The 5′ untranslated region (UTR) boundaries bases 1 to 70, and the 3′ UTR boundaries bases 4916-5120.

[0030] FIGS. 7A and 7B are northern blot analyses showing the expression of Zmax1 in various tissues.

[0031] FIG. 8 is a PCR product analysis.

[0032] FIG. 9 is allele specific oligonucleotide detection of the Zmax1 exon 3 mutation.

[0033] FIG. 10 is the cellular localization of mouse Zmax1 by in situ hybridization at 100× magnification using sense and antisense probes.

[0034] FIG. 11 is the cellular localization of mouse Zmax1 by in situ hybridization at 400× magnification using sense and antisense probes.

[0035] FIG. 12 is the cellular localization of mouse Zmax1 by in situ hybridization of osteoblasts in the endosteum at 400× magnification using sense and antisense probes.

[0036] FIG. 13 shows antisense inhibition of Zmax1 expression in MC-3T3 cells.

[0037] FIG. 14 shows a Zmax1 Exon3 Allele Specific Oligonucleotide (ASO) assay which illustrates the rarity of the HBM1 allele (right panels; T-specific oligo; 58° C. Wash) as compared to the wild-type Zmax1 allele (left panels, G-specific oligo; 55° C. Wash). The positive spots appearing in the right panels were positive controls.

[0038] FIG. 15 depicts a model representing the potential role of Zmax1 in focal adhesion signaling.

### DETAILED DESCRIPTION OF THE INVENTION

[0039] To aid in the understanding of the specification and claims, the following definitions are provided.

[0040] “Gene” refers to a DNA sequence that encodes through its template or messenger RNA a sequence of amino acids characteristic of a specific peptide. The term “gene” includes intervening, non-coding regions, as well as regulatory regions, and can include 5′ and 3′ ends.

[0041] “Gene sequence” refers to a DNA molecule, including both a DNA molecule which contains a non-transcribed or non-translated sequence. The term is also intended to include any combination of gene(s), gene-fragment(s), non-transcribed sequence(s) or non-translated sequence(s) which are present on the same DNA molecule.

[0042] The sequences of the present invention may be derived from a variety of sources including DNA, cDNA, synthetic DNA, synthetic RNA or combinations thereof. Such sequences may comprise genomic DNA which may or may not include naturally occurring introns. Moreover, such genomic DNA may be obtained in association with promoter regions or poly (A) sequences. The sequences, genomic DNA or cDNA may be obtained in any of several ways. Genomic DNA can be extracted and purified from suitable cells by means well known in the art. Alternatively, mRNA can be isolated from a cell and used to produce cDNA by reverse transcription or other means.

[0043] “cDNA” refers to complementary or copy DNA produced from an RNA template by the action of RNA-dependent DNA polymerase (reverse transcriptase). Thus, a “cDNA clone” means a duplex DNA sequence complementary to an RNA molecule of interest, carried in a cloning vector or PCR amplified. This term includes genes from which the intervening sequences have been removed.

[0044] “Recombinant DNA” means a molecule that has been recombined by in vitro splicing cDNA or a genomic DNA sequence.

[0045] “Cloning” refers to the use of in vitro recombination techniques to insert a particular gene or other DNA sequence into a vector molecule. In order to successfully clone a desired gene, it is necessary to use methods for generating DNA fragments, for joining the fragments to vector molecules, for introducing the composite DNA molecule into a host cell in which it can replicate, and for selecting the clone having the target gene from amongst the recipient host cells.

[0046] “cDNA library” refers to a collection of recombinant DNA molecules containing cDNA inserts which together comprise the entire genome of an organism. Such a cDNA library can be prepared by methods known to one skilled in the art and described by, for example, Cowell and Austin, “cDNA Library Protocols,” Methods in Molecular Biology (1997). Generally, RNA is first isolated from the cells of an organism from whose genome it is desired to clone a particular gene.

[0047] “Cloning vehicle” refers to a plasmid or phage DNA or other DNA sequence which is able to replicate in a host cell. The cloning vehicle is characterized by one or more endonuclease recognition sites at which such DNA sequences may be cut in a determinable fashion without loss of an essential biological function of the DNA, which may contain a marker suitable for use in the identification of transformed cells.

[0048] “Expression control sequence” refers to a sequence of nucleotides that control or regulate expression of structural genes when operably linked to those genes. These include, for example, the lac systems, the trp system, major operator and promoter regions of the phage lambda, the control region of fd coat protein and other sequences known to control the expression of genes in prokaryotic or eukaryotic cells. Expression control sequences will vary depending on whether the vector is designed to express the operably linked gene in a prokaryotic or eukaryotic host, and may contain transcriptional elements such as enhancer elements, termination sequences, tissue-specificity elements and/or translational initiation and termination sites.

[0049] “Expression vehicle” refers to a vehicle or vector similar to a cloning vehicle but which is capable of expressing a gene which has been cloned into it, after transformation into a host. The cloned gene is usually placed under the control of (i.e., operably linked to) an expression control sequence.

[0050] “Operator” refers to a DNA sequence capable of interacting with the specific repressor, thereby controlling the transcription of adjacent gene(s).

[0051] “Promoter” refers to a DNA sequence that can be recognized by an RNA polymerase. The presence of such a sequence permits the RNA polymerase to bind and initiate transcription of operably linked gene sequences.

[0052] “Promoter region” is intended to include the promoter as well as other gene sequences which may be necessary for the initiation of transcription. The presence of a promoter region is sufficient to cause the expression of an operably linked gene sequence.

[0053] “Operably linked” means that the promoter controls the initiation of expression of the gene. A promoter is operably linked to a sequence of proximal DNA if upon introduction into a host cell the promoter determines the transcription of the proximal DNA sequence(s) into one or more species of RNA. A promoter is operably linked to a DNA sequence if the promoter is capable of initiating transcription of that DNA sequence.

[0054] “Prokaryote” refers to all organisms without a true nucleus, including bacteria.

[0055] “Eukaryote” refers to organisms and cells that have a true nucleus, including mammalian cells.

[0056] “Host” includes prokaryotes and eukaryotes, such as yeast and filamentous fungi, as well as plant and animal cells. The term includes an organism or cell that is the recipient of a replicable expression vehicle.

[0057] “Fragment” of a gene refers to any variant of the gene that possesses the biological activity of that gene.

[0058] “Variant” refers to a gene that is substantially similar in structure and biological activity or immunological characteristics to either the entire gene or to a fragment of the gene. Provided that the two genes possess a similar activity, they are considered variant as that term is used herein even if the sequence of amino acid residues is not identical.

[0059] “Amplification of nucleic acids” refers to methods such as polymerase chain reaction (PCR), ligation amplification (or ligase chain reaction, LCR) and amplification methods based on the use of Q-beta replicase. These methods are well known in the art and described, for example, in U.S. Pat. Nos. 4,683,195 and 4,683,202. Reagents and hardware for conducting PCR are commercially available. Primers useful for amplifying sequences from the HBM region are preferably complementary to, and hybridize specifically to sequences in the HBM region or in regions that flank a target region therein. HBM sequences generated by amplification may be sequenced directly. Alternatively, the amplified sequence(s) may be cloned prior to sequence analysis.

[0060] “Antibodies” may refer to polyclonal and/or monoclonal antibodies and fragments thereof, and immunologic binding equivalents thereof, that can bind to the HBM proteins and fragments thereof or to nucleic acid sequences from the HBM region, particularly from the HBM locus or a portion thereof. The term antibody is used both to refer to a homogeneous molecular entity, or a mixture such as a serum product made up of a plurality of different molecular entities. Proteins may be prepared synthetically in a protein synthesizer and coupled to a carrier molecule and injected over several months into rabbits. Rabbit sera is tested for immunoreactivity to the HBM protein or fragment. Monoclonal antibodies may be made by injecting mice with the proteins, or fragments thereof. Monoclonal antibodies will be screened by ELISA and tested for specific immunoreactivity with IBM protein or fragments thereof Harlow et al, Antibodies: A Laboratory Manual, Cold Spring Harbor Laboratory, Cold Spring Harbor, N.Y. (1988). These antibodies will be useful in assays as well as pharmaceuticals.

[0061] “HBM” refers to high bone mass.

[0062] “HBM protein” refers to a protein that is identical to a Zmax1 protein except that it contains an alteration of glycine 171 to valine. An HBM protein is defined for any organism that encodes a Zmax1 true homologue. For example, a mouse HBM protein refers to the mouse Zmax1 protein having the glycine 170 to valine substitution.

[0063] “HBM gene” refers to the genomic DNA sequence found in individuals showing the HBM characteristic or phenotype, where the sequence encodes the protein indicated by SEQ ID NO: 4. The HBM gene and the Zmax1 gene are allelic. The protein encoded by the HBM gene has the property of causing elevated bone mass, while the protein encoded by the Zmax1 gene does not. The HBM gene and the Zmax1 gene differ in that the HBM gene has a thymine at position 582, while the Zmax1 gene has a guanine at position 582. The HBM gene comprises the nucleic acid sequence shown as SEQ ID NO: 2. The HBM gene may also be referred to as an “HBM polymorphism.”

[0064] “Normal,” “wild-type,” “unaffected” and “Zmax1” all refer to the genomic DNA sequence that encodes the protein indicated by SEQ ID NO: 3. The Zmax1 gene has a guanine at position 582. The Zmax1 gene comprises the nucleic acid sequence shown as SEQ ID NO: 1. “Normal,” “wild-type,” “unaffected” and “Zmax1” also refer to allelic variants of the genomic sequence that encodes proteins that do not contribute to elevated bone mass. The Zmax1 gene is common in the human population, while the HBM gene is rare.

[0065] “5YWT+EGF” refers to a repeat unit found in the Zmax1 protein, consisting of five YWT repeats followed by an EGF repeat.

[0066] “Bone development” generally refers to any process involved in the change of bone over time, including, for example, normal development, changes that occur during disease states, and changes that occur during aging. “Bone development disorder” particularly refers to any disorders in bone development including, for example, changes that occur during disease states and changes that occur during aging. Bone development may be progressive or cyclical in nature. Aspects of bone that may change during development include, for example, mineralization, formation of specific anatomical features, and relative or absolute numbers of various cell types.

[0067] “Bone modulation” or “modulation of bone formation” refers to the ability to affect any of the physiological processes involved in bone remodeling, as will be appreciated by one skilled in the art, including, for example, bone resorption and appositional bone growth, by, inter alia, osteoclastic and osteoblastic activity, and may comprise some or all of bone formation and development as used herein.

[0068] “Normal bone density” refers to a bone density within two standard deviations of a Z score of 0.

[0069] A “Zmax1 system” refers to a purified protein, cell extract, cell, animal, human or any other composition of matter in which Zmax1 is present in a normal or mutant form.

[0070] A “surrogate marker” refers to a diagnostic indication, symptom, sign or other feature that can be observed in a cell, tissue, human or animal that is correlated with the HBM gene or elevated bone mass or, both, but that is easier to measure than bone density. The general concept of a surrogate marker is well accepted in diagnostic medicine.

[0071] The present invention encompasses the Zmax1 gene and Zmax1 protein in the forms indicated by SEQ ID NOS: 1 and 3, respectively, and other closely related variants, as well as the adjacent chromosomal regions of Zmax1 necessary for its accurate expression. In a preferred embodiment, the present invention is directed to at least 15 contiguous nucleotides of the nucleic acid sequence of SEQ ID NO: 1.

[0072] The present invention also encompasses the HBM gene and HBM protein in the forms indicated by SEQ ID NO: 2 and 4, respectively, and other closely related variants, as well as the adjacent chromosomal regions of the HBM gene necessary for its accurate expression. In a preferred embodiment, the present invention is directed to at least 15 contiguous nucleotides of the nucleic acid sequence of SEQ ID NO: 2. More preferably, the present invention is directed to at least 15 contiguous nucleotides of the nucleic acid sequence of SEQ ID NO: 2, wherein one of the 15 contiguous nucleotides is the thymine at nucleotide 582.

[0073] The invention also relates to the nucleotide sequence of the Zmax1 gene region, as well as the nucleotide sequence of the HBM gene region. More particularly, a preferred embodiment are the BAC clones containing segments of the Zmax1 gene region B200E21-H and B527D 12-H. A preferred embodiment is the nucleotide sequence of the BAC clones consisting of SEQ ID NOS: 5-11.

[0074] The invention also concerns the use of the nucleotide sequence to identify DNA probes for the Zmax1 gene and the HBM gene, PCR primers to amplify the Zmax1 gene and the HBM gene, nucleotide polymorphisms in the Zmax1 gene and the HBM gene, and regulatory elements of the Zmax1 gene and the HBM gene.

[0075] This invention describes the further localization of the chromosomal location of the Zmax1 gene and HBM gene on chromosome 11q13.3 between genetic markers D11 S987 and SNP_CONTIG033-6, as well as the DNA sequences of the Zmax1 gene and the HBM gene. The chromosomal location was refined by the addition of more genetic markers to the mapping panel used to map the gene, and by the extension of the pedigree to include more individuals. The pedigree extension was critical because the new individuals that have been genotyped harbor critical recombination events that narrow the region. To identify genes in the region on 11q13.3, a set of BAC clones containing this chromosomal region was identified. The BAC clones served as a template for genomic DNA sequencing, and also as a reagent for identifying coding sequences by direct cDNA selection. Genomic sequencing and direct cDNA selection were used to characterize more than 1.5 million base pairs of DNA from 11q13.3. The Zmax1 gene was identified within this region and the HBM gene was then discovered after mutational analysis of affected and unaffected individuals.

[0076] When a gene has been genetically localized to a specific chromosomal region, the genes in this region can be characterized at the molecular level by a series of steps that include: cloning of the entire region of DNA in a set of overlapping clones (physical mapping), characterization of genes encoded by these clones by a combination of direct cDNA selection, exon trapping and DNA sequencing (gene identification), and identification of mutations in these genes by comparative DNA sequencing of affected and unaffected members of the HBM kindred (mutation analysis).

[0077] Physical mapping is accomplished by screening libraries of human DNA cloned in vectors that are propagated in E. coli or S. cereviseae using PCR assays designed to amplify unique molecular landmarks in the chromosomal region of interest. To generate a physical map of the HBM candidate region, a library of human DNA cloned in Bacterial Artificial Chromosomes (BACs) was screened with a set of Sequence Tagged Site (STS) markers that had been previously mapped to chromosome 11q12-q13 by the efforts of the Human Genome Project.

[0078] STSs are unique molecular landmarks in the human genome that can be assayed by PCR. Through the combined efforts of the Human Genome Project, the location of thousands of STSs on the twenty-two autosomes and two sex chromosomes has been determined. For a positional cloning effort, the physical map is tied to the genetic map because the markers used for genetic mapping can also be used as STSs for physical mapping. By screening a BAC library with a combination of STSs derived from genetic markers, genes, and random DNA fragments, a physical map comprised of overlapping clones representing all of the DNA in a chromosomal region of interest can be assembled.

[0079] BACs are cloning vectors for large (80 kilobase to 200 kilobase) segments of human or other DNA that are propagated in E. coli. To construct a physical map using BACs, a library of BAC clones is screened so that individual clones harboring the DNA sequence corresponding to a given STS or set of STSs are identified. Throughout most of the human genome, the STS markers are spaced approximately 20 to 50 kilobases apart, so that an individual BAC clone typically contains at least two STS markers. In addition, the BAC libraries that were screened contain enough cloned DNA to cover the human genome six times over. Therefore, an individual STS typically identifies more than one BAC clone. By screening a six-fold coverage BAC library with a series of STS markers spaced approximately 50 kilobases apart, a physical map consisting of a series of overlapping BAC clones, i.e. BAC contigs, can be assembled for any region of the human genome. This map is closely tied to the genetic map because many of the STS markers used to prepare the physical map are also genetic markers.

[0080] When constructing a physical map, it often happens that there are gaps in the STS map of the genome that result in the inability to identify BAC clones that are overlapping in a given location. Typically, the physical map is first constructed from a set of STSs that have been identified through the publicly available literature and World Wide Web resources. The initial map consists of several separate BAC contigs that are separated-by gaps of unknown molecular distance. To identify BAC clones that fill these gaps, it is necessary to develop new STS markers from the ends of the clones on either side of the gap. This is done by sequencing the terminal 200 to 300 base pairs of the BACs flanking the gap, and developing a PCR assay to amplify a sequence of 100 or more base pairs. If the terminal sequences are demonstrated to be unique within the human genome, then the new STS can be used to screen the BAC library to identify additional BACs that contain the DNA from the gap in the physical map. To assemble a BAC contig that covers a region the size of the HBM candidate region (2,000,000 or more base pairs), it is often necessary to develop new STS markers from the ends of several clones.

[0081] After building a BAC contig, this set of overlapping clones serves as a template for identifying the genes encoded in the chromosomal region. Gene identification can be accomplished by many methods. Three methods are commonly used: (1) a set of BACs selected from the BAC contig to represent the entire chromosomal region can be sequenced, and computational methods can be used to identify all of the genes, (2) the BACs from the BAC contig can be used as a reagent to clone cDNAs corresponding to the genes encoded in the region by a method termed direct cDNA selection, or (3) the BACs from the BAC contig can be used to identify coding sequences by selecting for specific DNA sequence motifs in a procedure called exon trapping. The present invention includes genes identified by the first two methods.

[0082] To sequence the entire BAC contig representing the HBM candidate region, a set of BACs was chosen for subcloning into plasmid vectors and subsequent DNA sequencing of these subclones. Since the DNA cloned in the BACs represents genomic DNA, this sequencing is referred to as genomic sequencing to distinguish it from cDNA sequencing. To initiate the genomic sequencing for a chromosomal region of interest, several non-overlapping BAC clones are chosen. DNA for each BAC clone is prepared, and the clones are sheared into random small fragments which are subsequently cloned into standard plasmid vectors such as pUC18. The plasmid clones are then grown to propagate the smaller fragments, and these are the templates for sequencing. To ensure adequate coverage and sequence quality for the BAC DNA sequence, sufficient plasmid clones are sequenced to yield six-fold coverage of the BAC clone. For example, if the BAC is 100 kilobases long, then phagemids are sequenced to yield 600 kilobases of sequence. Since the BAC DNA was randomly sheared prior to cloning in the phagemid vector, the 600 kilobases of raw DNA sequence can be assembled by computational methods into overlapping DNA sequences termed sequence contigs. For the purposes of initial gene identification by computational methods, six-fold coverage of each BAC is sufficient to yield ten to twenty sequence contigs of 1000 base pairs to 20,000 base pairs.

[0083] The sequencing strategy employed in this invention was to initially sequence “seed” BACs from the BAC contig in the HBM candidate region. The sequence of the “seed” BACs was then used to identify minimally overlapping BACs from the contig, and these were subsequently sequenced. In this manner, the entire candidate region was sequenced, with several small sequence gaps left in each BAC. This sequence served as the template for computational gene identification. One method for computational gene identification is to compare the sequence of BAC contig to publicly available databases of cDNA and genomic sequences, e.g. unigene, dbEST, genbank. These comparisons are typically done using the BLAST family of computer algorithms and programs (Altschul et al, J. Mol. Biol., 215:403-410 (1990)). The BAC sequence can also be translated into protein sequence, and the protein sequence can be used to search publicly available protein databases, using a version of BLAST designed to analyze protein sequences (Altschul et al, Nucl. Acids Res., 25:3389-3402 (1997)). Another method is to use computer algorithms such as MZEF (Zhang, Proc. Natl. Acad. Sci., 94:565-568 (1997)) and GRAIL (Uberbacher et al, Methods Enzymol., 266:259-281 (1996)), which predict the location of exons in the sequence based on the presence of specific DNA sequence motifs that are common to all exons, as well as the presence of codon usage typical of human protein encoding sequences.

[0084] In addition to identifying genes by computational methods, genes were also identified by direct cDNA selection (Del Mastro et al, Genome Res. 5(2):185-194 (1995)). In direct cDNA selection, cDNA pools from tissues of interest are prepared, and the BACs from the candidate region are used in a liquid hybridization assay to capture the cDNAs which base pair to coding regions in the BAC. In the methods described herein, the cDNA pools were created from several different tissues by random priming the first strand cDNA from polyA RNA, synthesizing the second strand cDNA by standard methods, and adding linkers to the ends of the cDNA fragments. The linkers are used to amplify the cDNA pools. The BAC clones are used as a template for in vitro DNA synthesis to create a biotin labelled copy of the BAC DNA. The biotin labelled copy of the BAC DNA is then denatured and incubated with an excess of the PCR amplified, Tinkered cDNA pools which have also been denatured. The BAC DNA and cDNA are allowed to anneal in solution, and heteroduplexes between the BAC and the cDNA are isolated using streptavidin coated magnetic beads. The cDNAs that are captured by the BAC are then amplified using primers complimentary to the linker sequences, and the hybridization/selection process is repeated for a second round. After two rounds of direct cDNA selection, the cDNA-fragments are cloned, and a library of these direct selected fragments is created.

[0085] The cDNA clones isolated by direct selection are analyzed by two methods. Since a pool of BACs from the HBM candidate region is used to provide the genomic DNA sequence, the cDNAs must be mapped to individual BACs. This is accomplished by arraying the BACs in microtiter dishes, and replicating their DNA in high density grids. Individual cDNA clones are then hybridized to the grid to confirm that they have sequence identity to an individual BAC from the set used for direct selection, and to determine the specific identity of that BAC. cDNA clones that are confirmed to correspond to individual BACs are sequenced. To determine whether the cDNA clones isolated by direct selection share sequence identity or similarity to previously identified genes, the DNA and protein coding sequences are compared to publicly available databases using the BLAST family of programs.

[0086] The combination of genomic DNA sequence and cDNA sequence provided by BAC sequencing and by direct cDNA selection yields an initial list of putative genes in the region. The genes in the region were all candidates for the HBM locus. To further characterize each gene, Northern blots were performed to determine the size of the transcript corresponding to each gene, and to determine which putative exons were transcribed together to make an individual gene. For Northern blot analysis of each gene, probes were prepared from direct selected cDNA clones or by PCR amplifying specific fragments from genomic DNA or from the BAC encoding the putative gene of interest. The Northern blots gave information on the size of the transcript and the tissues in which it was expressed. For transcripts which were not highly expressed, it was sometimes necessary to perform a reverse transcription PCR assay using RNA from the tissues of interest as a template for the reaction.

[0087] Gene identification by computational methods and by direct cDNA selection provides unique information about the genes in a region of a chromosome. When genes are identified, then it is possible to examine different individuals for mutations in each gene.

[0088] I. Phenotyping Using DXA Measurements

[0089] Spinal bone mineral content (BMC) and bone mineral density (BMD) measurements performed at Creighton University (Omaha, Nebr.) were made by DXA using a Norland Instruments densitometer (Norland XR2600 Densitometer, Dual Energy X-ray Absorptiometry, DXA). Spinal BMC and BMD at other locations used the machinery available. There are estimated to be 800 DXA machines currently operating in the U.S. Most larger cities have offices or imaging centers which have DXA capabilities, usually a Lunar or Hologic machine. Each location that provided spine BMC and BMD data included copies of the printouts from their machines to provide verification that the regions of interest for measurement of BMD have been chosen appropriately. Complete clinical histories and skeletal radiographs were obtained.

[0090] The HBM phenotype is defined by the following criteria: very high spinal BMD; a clinical history devoid of any known high bone mass syndrome; and skeletal radiographs showing a normal shape of the appendicular skeleton.

[0091] II. Genotyping of Microsatellite Markers

[0092] To narrow the genetic interval to a region smaller than that originally reported by Johnson et al, Am. J. Hum. Genet., 60:1326-1332 (1997), additional microsatellite markers on chromosome 11q12-13 were typed. The new markers included: D11S4191, D11S1883, D11S1785, D11S4113, D11S4136, D11S4139, (Dib, et al, Nature, 380:152-154 (1996), FGF3 (Polymeropolous, et al, Nucl. Acid Res., 18:7468 (1990)), as well as GTC_HBM_Marker_{—}1, GTC_HBM_Marker_{—}2, GTC_HBM_Marker_{—}3, GTC_HBM_Marker_{—}4, GTC_HBM_Marker_{—}5, GTC_HBM_Marker_{—}6, and GTC_HBM_Marker_{—}7 (See FIG. 2).

[0093] Blood (20 ml) was drawn into lavender cap (EDTA containing) tubes by a certified phlebotomist. The blood was stored refrigerated until DNA extraction. DNA has been extracted from blood stored for up to 7 days in the refrigerator without reduction in the quality or quantity of yield. For those subjects that have blood drawn at distant sites, a shipping protocol was successfully used on more than a dozen occasions. Blood samples were shipped by overnight express in a styrofoam container with freezer packs to provide cooling. Lavender cap tubes were placed on individual plastic shipping tubes and then into “zip-lock” biohazard bags. When the samples arrived the next day, they were immediately processed to extract DNA.

[0094] The DNA extraction procedure used a kit purchased from Gentra Systems, Inc. (Minneapolis, Minn.). Briefly, the procedure involved adding 3 volumes of a red blood cell lysis buffer to the whole blood. After incubations for 10 minutes at room temperature, the solution was centrifuged in a Beckman tabletop centrifuge at 2,000×g for 10 minutes. The white blood cell pellet was resuspended in Cell Lysis Buffer. Once the pellet was completely resuspended and free of cell clumps, the solution was digested with RNase A for 15 minutes at 37° C. Proteins were precipitated by addition of the provided Protein Precipitation Solution and removed by centriftigation. The DNA was precipitated out of the supernatant by addition of isopropanol. This method was simple and fast, requiring only 1-2 hours, and allowed for the processing of dozens of samples simultaneously. The yield of DNA was routinely >8 mg for a 20 ml sample of whole blood and had a MW of >50 kb. DNA was archived by storing coded 50 μg aliquots at −80° C. as an ethanol precipitate.

[0095] DNA was genotyped using one fluorescently labeled oligonucleotide primer and one unlabeled oligonucleotide primer. Labeled and unlabeled oligonucleotides were obtained from Integrated DNA Technologies, Inc. (Coralville, Iowa). All other reagents for microsatellite genotyping were purchased from Perkin Elmer-Applied Biosystems, Inc. (“PE-ABI”) (Norwalk, Conn.). Individual PCR reactions were performed for each marker, as described by PE-ABI using AmpliTag DNA Polymerase. The reactions were added to 3.5 μl of loading buffer containing deionized formamide, blue dextran and TAMRA 350 size standards (PE-ABI). After heating at 95° C. for 5 minutes to denature the DNA, the samples were loaded and electrophoresed as described in the operator's manual for the Model 377 DNA Sequencer (PE-ABI, Foster City, Calif.). After gel electrophoresis, the data was analyzed using PE-ABI GENESCAN™ and GENOTYPER™ software. First, within the GENESCAN™ software, the lane tracking was manually optimized prior to the first step of analysis. After the gel lane data was extracted, the standard curve profiles of each lane were examined and verified for linearity and size calling. Lanes, which had problems with either of these parameters, were re-tracked and verified. Once all lanes were tracked and the size standards were correctly identified, the data were imported into GENOTYPER™ for allele identification. To expedite allele calling (binning), the program Linkage Designer from the Internet web-site of Dr. Guy Van Camp (http://alt.www.uia.ac.be/u/dnalab/ld.html) was used. This program greatly facilitates the importing of data generated by GENOTYPER™ into the pedigree drawing program Cyrillic (Version 2.0, Cherwell Scientific Publishing Limited, Oxford, Great Britain) and subsequent linkage analysis using the program LINKAGE (Lathrop et al, Am. J. Hum. Genet., 37:482-498 (1985)).

[0096] III. Linkage Analysis

[0097] FIG. 1 demonstrates the pedigree of the individuals used in the genetic linkage studies for this invention. Specifically, two-point linkage analysis was performed using the MLINK and LIMAP components of the program LINKAGE (Lathrop et al, Am. J. Hum. Genet., 37:482-498 (1985)). Pedigree/marker data was exported from Cyrillic as a pre-file into the Makeped program and converted into a suitable ped-file for linkage analysis.

[0098] The original linkage analysis was performed using three models: (i) an autosomal dominant, fully penetrant model, (ii) an autosomal dominant model with reduced penetrance, and (iii) a quantitative trait model. The HBM locus was mapped to chromosome 11q12-13 by analyzing DNA for linked markers from 22 members of a large, extended kindred. A highly automated technology was used with a panel of 345 fluorescent markers which spanned the 22 autosomes at a spacing interval ranging from 6-22 cM. Only markers from this region of chromosome 11 showed evidence of linkage (LOD score˜3.0). The highest LOD score (5.74) obtained by two-point and multipoint analysis was D11S987 (map position 55 in FIG. 2). The 95% confidence interval placed the HBM locus between markers D11S905 and D11S937 (map position 41-71 in FIG. 2). Haplotype analysis also places the Zmax1 gene in this same region. Further descriptions of the markers D11S987, D11S905, and D11S937 can be found in Gyapay et al, Nature Genetics, Vol. 7, (1994).

[0099] In this invention, the inventors report the narrowing of the HBM interval to the region between markers D11S987 and GTC_HBM_Marker_{—}5. These two markers lie between the delimiting markers from the original analysis (D11S11S905 and D11S937) and are approximately 3 cM from one another. The narrowing of the interval was accomplished using genotypic data from the markers D11S4191, D11S1883, D11S1785, D11S4113, D11S4136, D11S4139,(Dib et al, Nature, 380:152-154 (1996)), FGF3 (Polymeropolous et al, Nucl. Acid Res., 18:7468 (1990)) (information about the genetic markers can be found at the internet site of the Genome Database, http://gdbwww.gdb.org/), as well as the markers GTC_HBM_Marker_{—}1, GTC_HBM_Marker_{—}2, GTC_HBM_Marker_{—}3, GTC_HBM_Marker_{—}4, GTC_HBM_Marker_{—}5, GTC_HBM_Marker_{—}6, and GTC_HBM_Marker_{—}7.

[0100] As shown in FIG. 1, haplotype analysis with the above genetic markers identifies recombination events (crossovers) in individuals 9019 and 9020 that significantly refine the interval of chromosome 11 to which the Zmax1 gene is localized. Individual 9019 is an HBM-affected individual that inherits a portion of chromosome 11 from the maternal chromosome with the HBM gene, and a portion from the chromosome 11 homologue. The portion inherited from the HBM gene-carrying chromosome includes markers D11S935, D11S1313, GTC_HBM_Marker_{—}4, D11S987, D11S1296, GTC_HBM_Marker_{—}6, GTC_HBM_Marker_{—}2, D11S970, GTC_HBM_Marker_{—}3, D11S4113, GTC_HBM_Marker_{—}1, GTC_HBM_Marker_{—}7 and GTC_HBM_Marker_{—}5. The portion from D11S4136 and continuing in the telomeric direction is derived from the non-HBM chromosome. This data places the Zmax1 gene in a location centromeric to the marker GTC_HBM_Marker_{—}5. Individual 9020 is an unaffected individual who also exhibits a critical recombination event. This individual inherits a recombinant paternal chromosome 11 that includes markers D11S935, D11S1313, GTC_HBM_Marker_{—}4, D11S987, D11S1296 and GTC_HBM_Marker_{—}6 from her father's (individual 0115) chromosome 11 homologue that carries the HBM gene, and markers GTC_HBM_Marker_{—}2, D11S970, GTC_HBM_Marker_{—}3, GTC_HBM_Marker_{—}1, GTC_HBM_Marker_{—}7, GTC_HBM_Marker_{—}5, D11S4136, D11S4139, D11S1314, and D11S937 from her father's chromosome 11 that does not carry the HBM gene. Marker D11S4113 is uninformative due to its homozygous nature in individual 0115. This recombination event places the centromeric boundary of the HBM region between markers D11S1296 and D11S987.

[0101] Two-point linkage analysis was also used to confirm the location of the Zmax1 gene on chromosome 11. The linkage results for two point linkage analysis under a model of full penetrance are presented in Table 1 below. This table lists the genetic markers in the first column and the recombination fractions across the top of the table. Each cell of the column shows the LOD score for an individual marker tested for linkage to the Zmax1 gene at the recombination fraction shown in the first row. For example, the peak LOD score of 7.66 occurs at marker D11S970, which is within the interval defined by haplotype analysis.

TABLE 1

| Marker | 0.0 | 0.05 | 0.1 | 0.15 | 0.2 | 0.25 | 0.3 | 0.35 | 0.4 |
|---|---|---|---|---|---|---|---|---|---|
| D11S935 | −infinity | 0.39 | 0.49 | 0.47 | 0.41 | 0.33 | 0.25 | 0.17 | 0.10 |
| D11S1313 | −infinity | 2.64 | 2.86 | 2.80 | 2.59 | 2.30 | 1.93 | 1.49 | 1.00 |
| D11S987 | −infinity | 5.49 | 5.18 | 4.70 | 4.13 | 3.49 | 2.79 | 2.03 | 1.26 |
| D11S4113 | 4.35 | 3.99 | 3.62 | 3.24 | 2.83 | 2.40 | 1.94 | 1.46 | 0.97 |
| D11S1337 | 2.29 | 2.06 | 1.81 | 1.55 | 1.27 | 0.99 | 0.70 | 0.42 | 0.18 |
| D11S970 | 7.66 | 6.99 | 6.29 | 5.56 | 4.79 | 3.99 | 3.15 | 2.30 | 1.44 |
| D11S4136 | 6.34 | 5.79 | 5.22 | 4.61 | 3.98 | 3.30 | 2.59 | 1.85 | 1.11 |
| D11S4139 | 6.80 | 6.28 | 5.73 | 5.13 | 4.50 | 3.84 | 3.13 | 2.38 | 1.59 |
| FGF3 | 0.59 | 3.23 | 3.15 | 2.91 | 2.61 | 2.25 | 1.84 | 1.40 | 0.92 |
| D11S1314 | 6.96 | 6.49 | 5.94 | 5.34 | 4.69 | 4.01 | 3.27 | 2.49 | 1.67 |
| D11S937 | −infinity | 4.98 | 4.86 | 4.52 | 4.06 | 3.51 | 2.88 | 2.20 | 1.47 |

[0102] A single nucleotide polymorphism (SNP) further defines the HBM region. This SNP is termed SNP_Contig033-6 and is located 25 kb centromeric to the genetic marker GTC_HBM_Marker_{—}5. This SNP is telomeric to the genetic marker GTC_HBM_Marker_{—}7. SNP_Contig033-6 is present in HBM-affected individual 0113. However, the HBM-affected individual 9019, who is the son of 0113, does not carry this SNP. Therefore, this indicates that the crossover is centromeric to this SNP. The primer sequence for the genetic markers GTC_HBM_Marker_{—}5 and GTC_HBM_Marker_{—}7 is shown in Table 2 below.

TABLE 2

| | | |
|---|---|---|
| Marker | Primer (Forward) | Primer (Reverse) |

| | | |
|---|---|---|
| GTC_FBM_Marker_5 | TTTTGGGTACACAATTCAGTCG | AAAACTGTGGGTGCTTCTGG |
| GTC_HBM_Marker_7 | GTGATTGAGCCAATCCTGAGA | TGAGCCAAATAAACCCCTTCT |

[0103] The kindred described have several features of great interest, the most important being that their bones, while very dense, have an absolutely normal shape. The outer dimensions of the skeletons of the HBM-affected individuals are normal, and, while medullary cavities are present, there is no interference with hematopoiesis. The HBM-affected members seem to be resistant to fracture, and there are no neurologic symptoms, and no symptoms of impairment of any organ or system function in the members examined. HBM-affected members of the kindred live to advanced age without undue illness or disability. Furthermore, the HBM phenotype matches no other bone disorders such as osteoporosis, osteoporosis pseudoglioma, Engelmann's disease, Ribbing's disease, hyperphosphatasemia, Van Buchem's disease, melorheostosis, osteopetrosis, pycnodysostosis, sclerostenosis, osteopoikilosis, acromegaly, Paget's disease, fibrous dysplasia, tubular stenosis, osteogenesis imperfecta, hypoparathyroidism, pseudohypoparathyroidism, pseudopseudohypoparathyroidism, primary and secondary hyperparathyroidism and associated syndromes, hypercalciuria, medullary carcinoma of the thyroid gland, osteomalacia and other diseases. Clearly, the HBM locus in this family has a very powerful and substantial role in regulating bone density, and its identification is an important step in understanding the pathway(s) that regulate bone density and the pathogenesis of diseases such as osteoporosis.

[0104] In addition, older individuals carrying the HBM gene, and therefore expression of the HBM protein, do not show loss of bone mass characteristic of normal individuals. In other words, the HBM gene is a suppressor of osteoporosis. In essence, individuals carrying the HBM gene are dosed with the HBM protein, and, as a result, do not develop osteoporosis. This in vivo observation is strong evidence that treatment of normal individuals with the HBM gene or protein, or a fragment thereof, will ameliorate osteoporosis.

[0105] IV. Physical Mapping

[0106] To provide reagents for the cloning and characterization of the HBM locus, the genetic mapping data described above were used to construct a physical map of the region containing Zmax1 on chromosome 11q13.3. The physical map consists of an ordered set of molecular landmarks, and a set of BAC clones that contain the Zmax1 gene region from chromosome 11q13.3.

[0107] Various publicly available mapping resources were utilized to identify existing STS markers (Olson et al, Science, 245:1434-1435 (1989)) in the HBM region. Resources included the GDB, the whitehead Institute Genome Center, dbSTS and dbEST (NCBI), 11 db, the University of Texas Southwestern GESTEC, the Stanford Human Genome Center, and several literature references (Courseaux et al, Genomics, 40:13-23 (1997), Courseaux et al, Genomics, 37:354-365 (1996), Guru et al, Genomics, 42:436-445 (1997), Hosoda et al, Genes Cells, 2:345-357 (1997), James et al, Nat. Genet., 8:70-76 (1994), Kitamura et al, DNA Research, 4:281-289 (1997), Lemmens et al, Genomics, 44:94-100 (1997), Smith et al, Genome Res., 7:835-842 (1997)). Maps were integrated manually to identify markers mapping to the region containing Zmax1.

[0108] Primers for existing STSs were obtained from the GDB or literature references are listed in Table 3 below. Thus, Table 3 shows the STS markers used to prepare the physical map of the Zmax1 gene region.

TABLE 3

| HBM STS Table | | | | | | | |
|---|---|---|---|---|---|---|---|
| STS Name | Locus Nam | Type | GDB Access. | Size (kb | Forward Primer | Reverse Primer | Gene Name |
| ACTN3 | | Gene | GDB:197568 | 0.164 | CTGGACTACGTGGCCTTCTC | TTCAGAAGCACTTGGCTGG | Aclinlin, alpha 3-skeletal muscle |
| PC-B/PC-Y | | Gene | GDB:197884 | 0.125 | CTCAGTGCCATGAAGATGGA | CAAGATCACTCGATCTCCAGG | Pyruvate Carboxylase |
| | D11S2181 | Gene | | 0.322 | GTTTCAGGAGACTCAGAGTC | TTCTGCAGGVTGCTGTTGAG | Adenosine Receptor (A2) Gene |
| ADRBK1 | | Gene | GDB:4590179 | 0.117 | TATTGTGATTTCCCGTGGC | GCCCTCTGTCCTGACTTCAGG | Beta-adrenergic receptor kinase |
| PSANK3 | | GENE | | 0.259 | GAGAAAGAAATAAGGGGACC | TGCTTTGTAAAGCACTGAGA | sim. lo Human andogenous retrovirus |
| | | | | | | | mRNA long terminal repeat |
| PP1(½)/PP1(2/2) | | Gene | GDB:197588 | 0.208 | GAAGTACGGGCAGTTCAGTGGCCT | ATACACCAAGGTCCATGTTCCCCGT | Protein phosphatase 1, catalytic sub- |
| | | | | | | | unit, alpha isoform |
| GSTP1.PCR1 | | Gene | GDB:270066 | 0.19 | AGCCTGGGCCACAGCGTGAGACTAC | TCCCGGAGCTTGCACACCCGCTTCA | Glutathion S-transferaes pl. |
| NDUFV1 | | Gene | | 0.521 | CATGTGCCCACCTCATTCAT | CAAGATTCTGTAGCTTCTGG | NADH dehydrogenase (ubiquinone) flavo- |
| | | | | | | | protein 1 (51 kD) |
| PSANK2 | | GENE | | 0.157 | CAGAGAAGTCAAGGGACTTG | ATCCTCTCACATCCCACACT | Aldahyde Dehydrogenase 8 (ALDH8) |
| PSANK1 | | EST | | 0.3 | CAAGGCTAAAAGACGAAAAA | TCAGGAGCATTTCATCTTTT | Human ribosomal protein L37 (PSANK1) |
| | | | | | | | pseudogene |
| UT5620 | D11S1917 | MSAT | GDB:314521 | 0.211 | AAGTCGAGGCTGCAAGGAG | GCCTGTGTTCCTTTCAGTA | |
| AFM289ya9 | D11S1337 | MSAT | GDB:199805 | 0.287 | AAGGTGTGAGGATCACTGG | AGCTCATGGGGGCTATT | |
| GALN | | Gene | | 0.322 | GCTTCTCCGAGTGTATCAAC | ATGGCAGAGGACTTAGAACA | Preprogalanin (GAL 1) |
| pMS51 | D11697 | VNTR | GDB:177850 | | GATCAGCGAACTTCCTCTCGGCTC | TCCACATTGAGGACTGTGGGAACG | |
| BCL1(1)/BCL1(2) | | Gene | | 0.205 | GCTAATCACAGTCTAACCGA | TTGCACTGTCTTGGATGCA | B-cell CLL/lymphoma 1-Cyclin D1(PRAD1 |
| | | | | | | | gene) |
| CCND1 | | Gene | GDB:4590141 | 0.248 | GCACAGTGTAGTGGGGTTCTAGGC | CAGGCGCAAAGGACATGCACACGGC | Cyclin D1 |
| FGF4 | | Gene | GDB:4590113 | 0.549 | CACCGATGAGTGCACGTTCAAGGAG | CAGACAGAGATGCTCCACGCCATAC | Fibroblast growth factor 4 |
| FGF3 PCR1 | | Gene | GDB:188627 | 0.161 | TTTCTGGGTGTGTCTGAAT | ACACAGTTGCTCTAAAGGGT | Fibroblast growth factor 3 |
| AFM164ZF12 | D116913 | MSAT | GDB:188151 | 0.22 | CATTTGGGAAATCCAGAAGA | TAGGTGTCTTATTTTTTGTTGCTTC | |
| AFMA190YD5 | | MSAT | GDB:122329 | 0.275 | GACATACGATGAACACTATAAGAGG | CAACCATACCAGGGATAAG | |
| SHGC-15295 | D11S4889 | STS | GDB:740600 | 0.147 | GAACAAGAGGGGTAAGTTGGC | TGAGGACACAGATACTGATGGG | |
| SHGC-3084 | D11S4540 | STS | GDB:740102 | 0.167 | GAAGTGTTCCCTCTTAAATTCTTTG | GAACTATATTGTAGTTAGTGAGGAG | |
| SHGC-14407 | D11S4664 | STS | GDB:740516 | 0.158 | CCTGTAACCCCCAGTCCC | TCTTGCTTCCTAAGTTTCTCGG | |
| SHGC-10946 | D11S4327 | Gene | GDB:674522 | 0.311 | ACTCCATCCACCTCATCACTG | TGCTGTTTGCCTCATCTGAC | Choline Kinase |
| S515 | D11S703 | STS | GDB:196290 | 0.166 | GTGGACAGGCATAGCTGAGG | TGTTCACTCTTCTGCCTGCAG | |
| AFM147XD10 | D11S1889 | MSAT | GDB:307895 | 0.183 | AGCTGGACTCTCACAGAATG | CAAGAGGCTGGTAGAAGGTG | |
| AFMA131YE5 | D11S987 | MSAT | GDB:195002 | 0.082 | GACTCCAGTCTGGGCAATAAAAGC | GGTGGCAGCATGACCTCTAAAG | |
| AFMb358xa9 | D11S4178 | MSAT | GDB:611922 | 0.237 | CAGGCCCAGTCTCTTG | CGTGTCCAGATGAAAGTG | |
| AFMa272yb5 | D11S4113 | MSAT | GDB:608115 | 0.218 | ACCTCACGGTGTAATCCC | CTTGAAGCCCATCTTTGC | |
| WI-17803 | | EST | GDB:4581644 | 0.15 | TATTTGCAAAGCTTGAGACTTCT | AATCACTGTGCTTTGTTGCC | |
| SGC31923 | | EST | GDB:4578606 | 0.126 | ACTTTATTGTCAGCGTGGGC | ACTCCCTCGATGGCTTCC | |
| WI-7741 | D11S4384 | GENE | GDB:677852 | 0.324 | GAGCAGGGGAGAGAAGGC | CCCAACTGGCTTGTTTTATTG | Transformation-sensitive protein EF SSP |
| | | | | | | | 3521 |
| SGC35223 | | EST | GDB:4582598 | 0.13 | AGCCACTTTATTGTTATTTTGATGC | AAGAGTGAACAAAAGCAAACATACC | 2NF162-splicing factor 1 |
| WI-16754 | | EST | GDB:4578377 | 0.15 | GTGGAGTGTGGGATTGGG | TACTGTTCTTGATAAGTATGTCGGC | |
| WI-6315 | D11S4418 | EST | GDB:678804 | 0.224 | ATGCTTTTGCATGATTCTAATTATT | TCCCCCAAAAGAATGTAAAGG | |
| WI-16915 | | EST | GDB:4584055 | 0.125 | GTGGTCTTCCTTGTGTGCTG | ATCACCCAGGCCAGGGAT | Milogan inducible gene (MIG-2) |
| SGC30608 | | EST | | 0.128 | TCAGAAGCAGAACTGTTTTTAACA | CCTGCTTGAAGTTCTAGAGCC | |
| WI-17663 | | EST | GDB:4583346 | 0.126 | CAAGCCGGGTTTTATTGAAA | GATGCCAGGACCATGGAC | |
| WI-6383 | | Gene | GDB:1222237 | 0.199 | GCATATAGAAACAATTTATTGCCG | CTCTGAAGCAGGGACCAGAG | Human lat interactive protein (TIP60) |
| SGC31567 | | Gene | GDB:4578432 | 0.207 | CTACCACACCACACCAGGC | CAAGCGAAAGCTGCCTTC | Calcium activated neutral protease |
| | | | | | | | large subunit,muCANP, caipain |
| SGC30658 | | EST | GDB:4584037 | 0.15 | GTTGTCTTGACTTCAGGTCTGTC | TTTTCCTTCAACAATCACTACTCC | |
| SGC34590 | | EST | | 0.13 | GCGTGGGGATATAGAGGTCA | TACGTGGCCAAGAAGCTAGG | |
| SGC33927 | | EST | GDB:4582382 | 0.15 | TAATATATCCCCAGTCTAAGGCAT | AGCTTGCAGATGGAGCCC | |
| WI-8671 | | EST | GDB:1222235 | 0.124 | TGGTTTTAAACCTTTAATGAGAAAA | TGTTGATCTATACCCTGTTTCCG | |
| WI-12334 | | EST | GDB:1222257 | 0.127 | AATTATTTAAAAGAGAGGAAAGGCA | TGGCTGTGAACTTCCTCTGA | |
| WI-18402 | | EST | GDB:4581874 | 0.113 | GGTTACAGAAAAACATTTGAGAGAT | TGAGCTTTAGTTCCCTTCTCTG | |
| WI-18671 | | EST | GDB:4584947 | 0.131 | TTGAAAAACCATTTATTTCACCG | TCTGCGGCTGTTGGATT | Hark |
| WI-12856 | | EST | GDB:4576606 | 0.209 | TTGAAAAACCATTTATTTCACCG | TGTTCTCTTCTCCCAGCAGG | Hark |
| SGC33767 | | EST | GDB:4581106 | 0.15 | CTTTATTGAAAACATTGAGTGCA | TTGTCAAATTCCCCCCAAAA | |
| AFM3436YB5 | | MSAT | GDB:1222332 | 0.181 | AAACCACGACCNCCAA | CCCTGGAAAGGTAAGATGCT | |
| SGC33744 | | EST | GDB:4575826 | 0.15 | CTTTTGGTAGAGACAAGGTCTCA | TATCTGTCTGTAGTGCTTCAAATGT | |
| SGC32272 | | EST | GDB:4581592 | 0.135 | GACGAAGGTGATTCAGGGC | ACTGAAGAACTCTTGTCCT | |
| SGC34148 | | EST | GDB:4583084 | 0.1 | CAGATAAAAGAGTCACTATGGCTCA | CACTTCTCCCACTTTGTCCC | |
| WI-18546 | | EST | GDB:4574598 | 0.133 | TTATTGATAAGCATTAGTGAACCCC | TGGCAAGTTAGGCACAGTCA | Human 1.1 kb mRNA unregulated in |
| | | | | | | | relinoic acid treated HL-60 neutro- |
| | | | | | | | philic cells |
| SGC31103 | | EST | GDB:4587265 | 0.1 | CTATGCCCAGAGATGAACAGG | TCCACTAAGGGCTATGTCGC | |
| SGC30028 | | Gene | GDB:4580505 | 0.128 | GCCAGCTTTATTGAGTAAACTTCC | CACTGGAGACTACAAGTGGTGG | Human pyruvate carbonylase precursor |
| WI-2875 | D11S4407 | STS | GDB:878546 | 0.125 | CATCCCAACCATCACTCAGT | GGGGACTAGCTTACAGATTTGA | |
| SGC36985 | | Gene | GDB:4577182 | 0.223 | AGACTACATTTTGGAACCAGTGG | TGAAAGGATATTTATAGCCTGGA | LAR-Interacting protein 1b |
| GCT16807 | D11S4270 | STS | GDB:626245 | 0.137 | GAAGGTTTTGTCCCTCGATC | TGAGGGTTGGGAAGATCATA | |
| WI-6504 | D11S3974 | EST | GDB:588142 | 0.174 | CCTTCATAGCCACACCCG | CAGCTAACTGTTGACATGCCA | |
| SGC31049 | | EST | GDB:4580093 | 0.15 | TCTTTACTGTGCTTACAACTTTCCT | CAACAGTGCAGTCGGTATCG | |
| TIGR-A002J17 | | EST | GDB:1222193 | 0.199 | AGATCAGCAAGCAGATAG | CATTCCACATGGATAGAC | NDUFV1 |
| WI-5995 | D11S2382 | EST | GDB:458683 | 0.1 | CATACCTATGAGGTGTGCTACAGG | GCATTTTCTCATCATCCTTGC | amplaxin (EMS1) |
| WI-16987 | | EST | GDB:4575848 | 0.15 | TTACAGCCACCAAGGTTTCC | AGGTGTGTGTGCCAGGTTGA | Nuclear milolic apparatus protein 1, |
| | | | | | | | NUMA |
| SGC31912 | | EST | GDB:4567868 | 0.101 | CACTGTTACTCTCATTAACTGTGAGG | TTTGATTTTGTGTCTCCAAA | |
| WI-13500 | | EST | GDB:4577893 | 0.15 | CCCCACTCCCACTTTTATTT | CCAGTCACCTTTACTAGTCCTTTG | |
| GHLC.GAAT1B01.P7933 | D11S971 | MSAT | GDB:684255 | 0.103 | AGGACACAGCCTGCATCTAG | ACCAGGCATTGCACTAAAAG | |
| SGC35519 | | Gene | GDB:4577180 | 0.134 | GATGGGTCACACTAACCTGTCA | ACATTTATATTTGGACATGCAACC | LAR-interacting protein 1a mRNA |
| WI-11974 | | EST | GDB:1222265 | 0.108 | AGCATCTTTAATGTGTCAGGCA | ATGTGCTGGGCTGGAAAG | Carniline palmiloyl transferase I |
| WI-15244 | | Gene | GDB:4574740 | 0.108 | TCACATTCAAAAATCGGCAA | CTGCCTGTGTGGTGTCGC | Beta-adrenergic receptor kinase 1, |
| | | | | | | | ADRB1 |
| WI-17496 | | EST | GDB:4583336 | 0.131 | TGTTTTATTTCTCAGTACAAAGCCA | GACCTCCTGTGACACCACG | |
| WI-9159 | D11S4381 | EST | GDB:678144 | 0.111 | CCACCAAATTATTTATAGTTCTGCG | GTAAGATTCTCCACTGTTGCACC | FGF4 |
| WI-4232 | | STS | GDB:1222250 | 0.175 | CCTATAATGGGCTGGACCAA | ACTCCTCATGTGAAGTCACCG | |
| SHGC-4167 | | EST | GDB:4566789 | 0.181 | CAGTGTGCACGTTTTCATTT | CAGCATCTTCAGCACTTACC | Human DNA helcare gen (SMBP2) |
| WI-14303 | | EST | GDB:4576938 | 0.15 | CTGCATTTATTATGAGAATCAACAG | TGCTGCTGGGAGTCAGAGTC | |
| WI-16597 | | EST | GDB:4585665 | 0.13 | CAGGGCACTGAGATACACTTACC | AAGGATCAAGCAGGCATTG | |
| RC29S1CATTFOR/RC29S1CATT | D11S970 | MSAT | GDB:191084 | 0.15 | ACACATCTCTTCTGTGCCCC | TGAACCCTGGAGGCAGAG | |
| UT979 | D11S1296 | MSAT | GDB:198525 | 0.362 | CATTCCCCAGTTTGCAGAC | GTGCTGGGATTACAGGTGT | |
| 1281/1282 | D11S1959 | EST | GDB:335216 | 0.07 | GCAGAGAAGTCCTGTTAGCC | CCATGCTAGAGAAGCACAAC | |
| D11S468 | D11S468 | STS | | 0.096 | AGTGTGGGGCAGGACCTCTG | CAGACAGATAGCCCTGGGTC | |
| D11S668 | D11S668 | STS | GDB:179349 | 0.143 | TCCCTCATCCCCTTGTCTGT | AGCCCCCCCTGGGGATAATC | |
| RH18048 | | Gene | GDB:4578253 | 0.188 | GATGCTTACCTACCACGGC | AGGATTCCTATCTGGGCTATG | Aldehyde dehydrogenase (ALDH8) |
| IGHMBP2 | | Gene | GDB:4590087 | 0.699 | TGGCAGACCATGCTCCGCCT | GAGAAGGCCGGGAGGCTCTG | Human DNA helicase gen (SMBP2) |
| NUMA | | Gene | GDB:4590244 | 0.277 | CTCCATCACAACCAGATTTGAGGCT | GGGTGTGAGCTGCTGCTGAAGG | Nuclear mitotic apparatus protein 1, |
| | | | | | | | NUMA |
| KRN1 | | Gene | GDB:4590232 | 0.228 | AGTGGGAAACCTCAGGTAGCTCCCG | CAGTTTGGCTCAGACATATGGGGGGC | High sulphur keralin, KRN |
| Cda1ff06 | D11S2302 | EST | GDB:445887 | 0.091 | CATTAAGTAGTGGGGGG | CAAAGCGACAGTGAGTTAGGG | |
| RH10753 | | Gene | GDB:4563588 | 0.194 | GGAGTAGACCATGATTACTG | CATGGTCTATTTATTCTCG | protein phosphatase 24, PP2A |
| EMS1 | | Gene | GDB:459018 | 0.64 | CGCCCTGGATCCTCACACTACA | GGGCATCAGGGGATGGGTAGA | Amplaxin |
| SHGC-11098 | DXS9736 | Gene | GDB:737674 | 0.137 | GCTCCTATCTGTGTTTTGAATGG | CCGTGGCATAAGATAAGTAAACG | Androgen Recaptor |
| INPPL1 | | Gene | GDB:4590093 | 0.382 | CTTGGAGCGCTATGAGGAGGGC | ATGGCAACTGACCTTCCGTCCTG | 51C protein inositol polyphosphate |
| | | | | | | | phosphatase-like 1 |
| RH18051 | | EST | GDB:4572859 | 0.195 | TTGGAGTCACAGGGGC | CAGCATATCCTTGGGG | NDF1 |
| Cda1cc11 | D11S2297 | EST | GDB:445869 | 0.1 | AACAAAGCTGCTTAGCACCTG | GATGAGGACCAACTGGTGAC | |
| 1249/1250 | D11S1957 | EST | GDB:335210 | 0.247 | TTTTCCAATAATGTGACTTC | CAATCCCAACCGTAACAGGC | |
| NDUFV1 | D11S2245 | EST | GDB:445695 | | CTTGATCTCGCCCAGGAAC | GCTCGCTGAAGGATGAAGAC | NDUFV1 |
| AFMb032zg5 | D11S4136 | MSAT | GDB:609546 | 0.19 | GAATCGCTTGAACCCAG | CCAGGTGGTCTTAACGG | |
| AFMa059xg9 | D11S4196 | MSAT | GDB:614025 | 0.2 | GAACGTTNTTCATGTAGGCGT | TAATGGTCGCTGTCCC | |
| Cda17c12 | D11S2288 | EST | GDB:445842 | 0.158 | AGGGAAAATGGTATGTGGGGAβ | GCAGTGTGTGAAGGCAGG | |
| SHGC-1364 | D11S951E | EST | GDB:4562765 | 0.137 | AGTGGACAAAATGAGGAAAACAGG | CCAACACAGTTTGCTCACATGCC | |
| RH17410 | | EST | GDB:4571587 | 0.126 | TGACATCTTTGCATTATGGC | AGTTATCCCACCTGATACCG | |
| RH17414 | | EST | GDB:4571595 | 0.121 | AGCTCTTGCTTCTCAGTCCA | CAAAAGTTGTTTCTGTGTTTGTTC | |
| RH17770 | | EST | GDB:4572301 | 0.267 | GCCTCTCAAAGTAGTTGGAACC | TGTGTATCCATAGTGCAAAACAG | |
| SEA | | EST | GDB:4590189 | 0.13 | CTCAAGGCCAGGCATCACT | GGACTCTTCCATGCCAGTG | S13 avlan arythrobiastosis oncogene |
| | | | | | | | homolog |
| RH10689 | | EST | GDB:4563460 | 0.107 | AATGATGATCTCAACTCTG | ACTGAAGAACTCTTGTCCT | |
| TIGR-AD06P20 | | EST | GDB:4587692 | 0.238 | GACATCTGTTAGTCTCATAATTC | GGTAACAGTGTCTTGCTT | |
| TIGR-A007D15 | | Gene | GDB:4588396 | 0.24 | CTATGTACAAAACAGGAAGAG | ATCCTAGTTTCCTCTCCTT | Merin gene (MEN1) |
| TIGR-A008B14 | | EST | GDB:4588882 | 0.141 | GTAAATGAGAAACAGACAAATGA | CTATTGGATGTGATATGTTATGG | |
| TIGR-A008K11 | | EST | GDB:4589094 | 0.203 | AAGTAGAAACAAAATGAGGGAC | CCTACCCCAAGGTAACAβ | |
| TIGR-A008P15 | | EST | GDB:4589662 | 0.182 | ACTTCCTATAAATGGAGGTGAG | GAGGAGCTTCAAGAGGAA | |
| TIGR-A008T11 | | EST | GDB:4589278 | 0.138 | CATACTCCTAGACTCAAGGAATC | GAATGATGTACATGAATTCTTTG | |
| TIGR-A008U48 | | EST | GDB:4589364 | 0.107 | GTGTTGAGGAGAAAAGCACT | CTCCCAGTAGTCACATTCC | |
| TIGR-A008X45 | | EST | GDB:4589838 | 0.242 | CAAGTTACAAATAACTTAAGCCG | CAAGACCCTATCTCTACAAAAAC | |
| SHGC-11839 | D11S4611 | Gene | GDB:740339 | 0.151 | TTTATTAGAAGTGACTCTTGGCCC | GACTACCTGCCCTCAGCTTG | Folate receptor 2 (FBP2) |
| NIB1242 | D11S4929 | EST | GDB:3888276 | 0.149 | TTCTCATGTACAAAGCGGTC | CCACTGGCTTCTCTCTTTTT | cGMP-simulated 3′, 5′-cyclic nucleotide |
| | | | | | | | phosphodiasterase PDE2A3 (PDE2A) |
| SHGC-13599 | D22S1553 | Gene | GDB:737558 | 0.147 | CACCAGAAGGTTGGGGTG | ACTATTACGACATGAACGCGG | Macrophage Migration inhibitory factor |
| SHGC-11867 | D11S4331 | Gene | GDB:674684 | 0.14 | CTCATGCTGGATGACCCC | TTGCCTTTCTTGAAACTTAATTCC | P2U Purinoceptor |
| SHGC-15349 | D12S2124 | EST | GDB:740819 | 0.141 | TCACAGCCTTCAGTCAGGG | ACATGCTGTGGCACCATG | |
| BdaB4a05 | D11S2235 | EST | GDB:445662 | 0.095 | CCTGAGCTACTGCCACAG | CCCTGACTTGGACAGTGTCC | |
| Bda99d07 | D11S2238 | EST | GDB:445674 | 0.09 | TCAGAGTCACTCCTGCCC | CAAATTCAAGCTCATCCAGACC | |
| foir1 | | Gene | GDB:197840 | 0.3 | CGGCATTTCATCCAGGAC | GGTGTAGGAGGTGCGACAAT | Folate receptor 2 (FBP2) |
| NIB1738 | D11S4284 | EST | GDB:626260 | 0.173 | TTCCATTTATTGAGCACCTG | CTTAAGCCACTGTGTTTGG | |
| WI-7351 | D11S4433 | Gene | GDB:679143 | 0.324 | CCTCCTACACCTGCAAAAGC | TGGAAGAACCCCAGAGGAC | Folate receptor 3 (FBP3) |
| WI-14325 | | EST | GDB:4578507 | 0.132 | AAAGCACAAAAGTAACAGCAACA | GTGTGTGGGCCACAATATTG | |
| WI-15192 | | EST | GDB:4575806 | 0.15 | AGAGCACCTTTCCTCAGCAC | AGAATCTCATCACAGGGGCG | |
| WI-17872 | | EST | GDB:4577492 | 0.141 | AAAAAGGACAGTGTCTAAAATTTGA | AATTGTTTTTGTTTGTTTTTTTGAGT | |
| SHGC-30732 | | EST | GDB:4567830 | 0.105 | GATTTAGGGAGTACAAGTGCGG | GGGGACAAATTATACTTTATTCAGG | |
| sISG4288 | | EST | GDB:4566057 | 0.123 | CCATCATCATATTGTGTGTGACC | TGGCTGCCCAAGAAGAAG | |
| WI-13814 | | EST | GDB:4579290 | 0.15 | TTAAGATGCCATTAAACTCATGAC | CCAAGGAGATGACCAAGTGG | DRES9 |
| WI-14122 | | Gene | GDB:4576114 | 0.126 | CCATCTCTTTTATCAGGGTTGG | CTCTGTGCAAGTAAGCATCTTACA | Human VEGF related factor isoform VRF |
| | | | | | | | 186 precursor (VRF) |
| 279/2730 | D11S4057 | EST | GDB:596509 | 0.118 | CGACTGTGTATTTTCCACAG | AGAAGCCCATATCAATGCAC | |
| SHGC-31329 | | EST | GDB:4567386 | 0.15 | AGCTTAAAGTAGGACAACCATGG | GGATGCTTCACTCCAGAAG | |
| SGC33858 | | EST | GDB:4578600 | 0.127 | TGTTGTTTATTTCCACCTGCC | AGAGTGGCTGCAGGCCAG | |
| WI-12191 | | EST | GDB:1222208 | 0.15 | TTTTTTTTTTACACGAATTTGAGG | TGAGGAAGTAAAAACAGGTCATC | |
| WI-13701 | | EST | GDB:4574892 | 0.15 | ATGAAATCTTAAGCAGAATCCCA | CACAGAGTCCCAGGGTCTGT | |
| WI-14069 | | EST | GDB:4584373 | 0.15 | AAAGGCCTTTATTTATCTCTCTCTG | GCCTCAGAGCTGGTGGGT | |
| WI-14272 | | EST | GDB:4578525 | 0.125 | GCTTCTAAGTCTTAGAGTCAGCTGG | AGCCCACAGTCAGCCTACC | |
| WI-17347 | | EST | GDB:4578523 | 0.127 | TTGGTTAAATGATGCCCAGA | TGGTCCCACTCACATCCC | |
| sISG1561 | | EST | GDB:4554415 | 0.215 | ACACAGCATGCAGGGAGAG | ATCCCTGGTGCTTAGGTGG | |
| sISG1938 | | EST | GDB:4564568 | 0.137 | GATGGAAGTAGCTCCTCTCGG | GGAAGGCCAGCAAGTACTACC | |
| sISG2759 | | EST | GDB:4565137 | 0.141 | CCGGTGCTTGGAAAGATG | GAAGTGTCTCTGTTGGGGGA | |
| RH97 | | EST | GDB:4559690 | 0.17 | TTACAGGCATGAGTCACTACGC | ACCACTCTCACAGCCCTTACA | |
| sISG4794 | | EST | GDB:4573113 | 0.141 | CCCTCCCTCCACACACAC | GCTCACTGAACTTTCAGGGC | |
| sISG4957 | | EST | GDB:4569051 | 0.171 | AGATACGGGCAAAACACTGG | GTTGAATATAGAGCAGGGCCC | |
| sISG4974 | | EST | GDB:4569063 | 0.166 | TTCTGAGGTCAGGGCTGTCT | AGCTTGGAAAATCTCGTGTCA | |
| sISG8144 | | EST | GDB:4573137 | 0.17 | ACTCAGTCCCTCCCACCC | TCCTCTCACTCCTTCCCAGA | |
| sISG9275 | | EST | GDB:4569999 | 0.19 | GTGATCACGGCTCAACCTG | TGGAGGACTGCTTGAGCC | |
| SHGC-10667 | D11S4583 | Gene | GDB:740246 | 0.277 | CTGCAGCTGCCTCAGTTTC | TCAAAAGTGCTGGTGACAGC | Human protein kinase (MLK-3) |
| SHGC-11930 | | Gene | GDB:1231223 | 0.21 | ATTTCCAGAGCCAGCTCAAA | CTTTAATGTTGTGATGACACAAAGC | FGF3 |
| SHGC-32788 | | EST | GDB:4567878 | 0.125 | GATCATGCACTGTTGACCAC | TACATTTGAAACATTTAAAACCTGA | |
| FKBP2 | | Gene | | 0.064 | AACTGAGCTGTAACCAGACTGGGA | TGGAACAGTCTGGTCCTGATGG | FK508-Binding Protein Precursor |
| | | | | | | | (FKBP-13) |
| WI-13116 | | EST | GDB:4585099 | 0.202 | TTATCCCTTTATTGTTTCTCCTTG | TGGTCACCTGTATTTATTGCTAGG | |
| MDU1 | | Gene | GDB:4590064 | 0.859 | TCTTCAAAGCCTCTGCAGTACC | CTCATCTCCAACCTGTCTAACC | 4F2 Cell-Surface Anligan Heavy Chain |
| | | | | | | | (4F2HC) |
| S453 | D11S579 | STS | GDB:196276 | 0.108 | GTGGCTGCAGCTAATGTAAGACAC | CAGCAGTAGACAATGGCGTAAGTCC | |
| STS1-cSRL-112e11 | D11S3868 | STS | GDB:547681 | 0.135 | CTGATTGAGAACCAGAACAG | TAAAGCCCTATAACCTCTCC | |
| STS1-cSRL-44a3 | D11S3830 | STS | GTC:547609 | 0.118 | TAGTAAGGGACCTTCACCAG | AGATGTTTGGTATGACTTGG | |
| STS1-cSRL-31b12 | D11S2439 | STS | GDB:459728 | 0.123 | GATGATTAAACTCTCCTGGC | GAGACAGCTAAGCACTCATG | |
| eSRL-419 | D11S1137 | STS | GDB:197824 | 0.196 | GAGGTGGTGGGCACCTGTA | AGAGGGGAGGAACACACCTT | Folate receptor 2 (FBP2) |
| SHGC-10323 | D11S4351 | Gene | GDB:676135 | 0.141 | GACCAGAGTCTGCCCAGAAG | TCCCCAGCTCTATCCCAAC | Collagen binding protein 2, colligin-2 |
| | | | | | | | gene (CBP2) |
| WI-9219 | | Gene | GDB:678179 | 0.1 | GGAGGGATGGACAAGTCTGA | GTCCAGCTCGCTGACTATCC | Retinal outer segment membrane protein |
| | | | | | | | 1, ROM1 |
| GTC ZNF | | Gene | | 0.172 | TCAAAACACAGTCATCTCCA | GCAAAGGCTTTACCATATTG | ZNF128 |
| AFMa152yn1 | D11S4087 | MSAT | GDB:603797 | 0.158 | GCTCAGCACCCCCATT | TCCCTGCTCGGGAAAC | |
| AFMb331zh5 | D11S4162 | MSAT | GDB:611241 | 0.263 | GTTCTCCAGAGAGACAGCAC | GAGAGCAACACTATTGCCC | |
| AFMb038yb9 | D11S4139 | MSAT | GDB:609621 | 0.151 | TATAGACTTCAGCCCTGCTGC | CCTCTGTAGGATGCAGTTGG | |
| AFM212xe3 | D11S1314 | MSAT | GDB:199292 | 0.209 | TTGCTACGCACTCCTCTACT | GTGAAGGCAGGAAATGTGAC | |
| WI-18813 | | EST | | 0.13 | ATCCTAGACCAGAGGAGCCC | CTCCCCCTGGTCCAGTTATT | Serial/theronine kinase |
| WI-19549 | | EST | | 0.252 | AACTTTCATTTGCCAAGGGA | AGCAGATCTGCTCTTGCGAT | |
| WI-20154 | | EST | | 0.25 | ACAGTTGTCATCGGTAGGCA | AAAAGTATGAATGGGATGGAGC | |
| WI-22393 | | EST | GDB:4583084 | 0.142 | GTGCAGGTGGCGTTTATTTT | CCCTATATCTCCGTGTGCTCC | DRES9 |
| WI-7587 | | EST | GDB:1223732 | 0.274 | GCTCTAGTGGGAAACCTCAGG | GAATTCCAGGCTCTTGCTTG | Ultra high-sulfur keralin protein (KRN1) |
| EST455579 | | EST | | 0.273 | GGTTTGGTCTCAAAGGCAAA | CCASGTACATGGTGGTCACCA | |
| WI-21134 | | EST | | 0.293 | GCTGCCTTGGAATTTCTGTT | GTGCTGTGGTGGGGAAAG | Fas-associating death domain-containing |
| | | | | | | | protein, FADD |
| WI-21698 | | EST | | 0.25 | ATTCAAGCTCATCCAGACCC | GGACTGGCCCTTTGAAACTC | |
| SHGC-7373 | D11S4567 | STS | GDB:740192 | 0.225 | ATATTGACCGTGCACAAATACG | AGACCTGGGAAAAGTGGAGAA | |
| SHGC-36533 | | STS | | 0.125 | ATTGGCAGTGGAAAATGCTT | TTAATCTTTTGTCAACTTCCTGATT | |
| ARIX | | Gene | | 0.242 | tctgtcctcctttcaccggaagc | ggataaagaaactccgctctgctggtaga | Arix homeodomain protein, neuroendoc- |
| | | | | | | | trine specific, fx factor |
| CLCI, PCR | | Gene | GDB:6262613 | | TCAGGGCCTGTGTTGCCGCACTCTG | AGCGATGTAAAGGGTACCAGTGCCG | Chloride channel current inducer, ICLN |
| | | | | | | | gene |
| B188N21-HL | STS | | | AGGCATGCAAGCTTCTTA | CCGGGAGGAGACATCTAT | | |
| B234C17-HR | | STS | | | TGGTAAGCACAGAAAATGC | AATGGATGGGGGATTATT | |
| B235G10-HR | | STS | | | CTGGACGTTATGTCTGCC | AGAGGCCCAGTCACAGAT | |
| B247F23-HR | | STS | | | ATCACTCTGAACTGCCACT | CCCTTCTGTTTTTCTGTTTT | |
| B337H24-HL | | STS | | | CAAGCTTTGAAGGAAGAG | TAGGACGTTAAGTGAGGAC | |
| B337L5-HL | | STS | | | GCTCTGCAGTGGGTAAAA | ACTCTCCAAGACTGTGCG | |
| B382N10-HR | | STS | | | CCCTTTCTGAGGCAAGAT | GACCACCTGGGAGAGAAC | |
| B1211-HR | | STS | | | CGCTATGAGTCCCATCTG | GATCAGCTGCAATGAAGG | |
| B180D17-HR | | STS | | | TTGAGTACACGGGGTGAC | CGCAGGACTGAAAGATGA | |
| B236E6-HR | | STS | | | ACCTGTCTCCTCTCCTGG | TGCTTTTCTTCTGTGGGA | |
| B27BE22-HR | | STS | | | ATGACCAGCAAGCATTGT | GTACTGGGATTACAGGCG | |
| B312F21-HR | | STS | | | GCAGAAGGTCCTTTGGAT | TTTGCAGGATTCATGCTT | |
| B337H24-HR | | STS | | | CGACATTCTTTTCTGGAGG | ACCTTTGCATGTTGGTTTT | |
| B358H9-HR | | STS | | | GCACTTTTCCTTCCTTCC | TGCTTTGCTTTCTTCTGG | |
| B148N18-HL | | STS | | | ACAGCTCCAGAGAGAAGGA | GCAGTCACTTGAAACCAGA | |
| B172N12-HL | | STS | | | AGGCATCAAGCTTTCCTT | GGTTTAGAGAACCGAGCC | |
| B172N12-HR | | STS | | | GTGGTGCTGCAAGTTACC | GGAATCCCTTTCTTTCCA | |
| B215J11-HR | | STS | | | GACCATTTGTTACGCAGC | GATGGGTGTGAATGAACAA | |
| B223E5-HR | | STS | | | CTCAAGCTTCTGTTCATGC | GCTGTGAGTGTCTTGGCT | |
| B312B3-HR | | STS | | | TACAGAAAACCGCAGCTC | GCCACCAAAGGAAGATT | |
| B328G19-HL | | STS | | | AAAAGGAGGGAATCATGG | TCACTTAGCAGGAGGCAG | |
| B328G19-HR | | STS | | | CTGAGCATCCGATGAGAC | GTGCAAAATGAGCAGCTT | |
| B32910-HL | | STS | | | TCTAACCCCTTACTGGGC | TCCTCAAACTGGGAATGA | |
| B32910-HR | | STS | | | TTTACACAGGACCAGGGA | ATCTCCCCCACTCAGAAG | |
| B368G19-HL | | STS | | | GTCCACGGGCTTTATTCT | TGAGCATAAATTTCATTAGCTG | |
| B368G19-HR | | STS | | | GGAAGAGCAAAATAAATCCA | GGTGCACAGAATTGTTCAT | |
| B36F16-HL | | STS | | | AGCACGCTTATTTCATGG | GTAACACCAGCAGGGACA | |
| B250K11-HR | | STS | | | TCCTGCTGCATTATGGAT | GGGGGTGAGAAGTAGGAA | |
| B338D17-HR | | STS | | | ATGGGGATTAAATACGGG | AGCTAGCATTGGGCTCTT | |
| B268123-HL | | STS | | | CTGAGGAGAAGAGGCTGG | CGCCTTACAAGGCAAGTA | |
| B368123-HR | | STS | | | AGGATGCTTGCTAGGGTT | CACAAGTGTCTGGAAGGC | |
| B371E15-HR | | STS | | | GGTCTCAGGAGCCCTTTA | ACATGCCACTCTTCTCACTAA | |
| B312F21-HL | | STS | | | ACTTAACCAAGGATGGGG | CAACCCAGAGCATAAGA | |
| B338D17-HL | | STS | | | TAGGCTCTGCACTCTTGG | ACCCACGGAGTCTCTCTC | |
| B369H19-HL | | STS | | | TAAAGGCGGTGAAGTGAG | CTACCGCTCTCCTAGGCT | |
| B369H19-HR | | STS | | | TGGGGCCAGATAATTCTT | CTGGTGTTTGGTGGTGTT | |
| B444M11-HR | | STS | | | AAGGAAGAGGTCACCAGG | CACAAATTCCATTTCCCA | |
| B269L23-HL | | STS | | | TCAATAGGTGATCCAACATTT | AAAGTCCCACAAAGGGTC | |
| B250K11-HL | | STS | | | GGGTAGGGGGGATCTTTTT | TGTGGAACATTCATTGGC | |
| B269L23-HR | | STS | | | GTCCTGGGAAAGATGGAA | TCAAAGCGTCTCCCATAA | |
| B364H4-HL | | STS | | | TCTTTCGCTGTACTTGGC | TGGGAGGTCAGAGTGATG | |
| B364H4-HR | | STS | | | GGACAGTGTATGTGTTGGG | AGGCAGCTGTTTTTGTGA | |
| B47303-HR | | STS | | | CTTCTTGAGTCCCGTGTG | CAACCGAGAATCCTCTAGC | |
| B180D17-HL | | STS | | | GCTGGGAGAGAATCACAA | GCTTTGCAGAAGAGACCA | |
| B200E21-HL | | STS | | | ACGCTGTCAGGTCACACT | GGAGGATGCTCAGGTGAT | |
| B200E21-HR | | STS | | | TAGGGGGATCTTTTTCCA | GAGCAATTTGAAAAGCCA | |
| B14L15-HR | | STS | | | ATGGTCCAGCTCCTCTGT | ATAGAGCACCCCATCTCC | |
| B442P6-HR | | STS | | | AACATTGCTGTTAGCCCA | GCAATCGAACAGCATTC | |
| B188N21-HR | | STS | | | ATGAGTTGGCAGCTGAAG | AATGAAGGTCTTGCCTCC | |
| GTC-ARRB1 | | Gene | | 0.067 | GAGGAGAAGATCCACAAGCG | TCTCTGGGGCATACTGAACC | Beta-arresin-1 |
| B508A5-HL | | STS | | | CTGAGCTTTTGGCACTGT | CTGTAGGTGACAGCAGG | |
| B36F16-HR | | STS | | | TGTATGAGTCTGGAGGGTGT | ACACCTGGCTGAGGAAAT | |
| B117N18-HL | | STS | | | GCAGGGGACGTGATAATA | TTTTGCTTCCTACCATGC | |
| B14L15-HL | | STS | | | AAAATTGTGAGCACCTCC | TTTATATTTAAAGTGGCTTTGTT | |
| B21K22-HL | | STS | | | GTGCAAAGCCCACAGTAT | AGGAAAATGCAAGAGCAG | |
| B21K22-HR | | STS | | | CCACTGAATTGCATACTTTG | TCTGGGTCCAGTCTGCTA | |
| B223E5-HL | | STS | | | AGATTTTGGGGAGTCAGG | GCGCTCAAGCAATTCTC | |
| B278E22-HL | | STS | | | CAAGCCCCAAAGTAGTCA | GAATCATCCAATCCACGA | |
| B4444M11-HL | | STS | | | AGCCTCCAGGTGACTACC | GAAGGACATGGTTCAGCAG | |
| B543D19-HR | | STS | | | ATGCTTTCAGCATTTTCG | TGATCCGTGGTAGGGTTA | |
| B117N18-HR | | STS | | | GTCGGATTGGTTTCACAA | TTTTATGGGAATTTCAGCC | |
| B543O19-HL | | STS | | | TTTGGAAAAGAACAGAAATGT | GGCTAGTCTTTCCTGAACC | |
| B442P6-HL | | STS | | | CCTTAATGCCCCTGATTC | GCGTTTACAAGCTGAGGA | |
| B367H4-HR | | STS | | | TCAAGCTTGCTTTCTCAA | GTAGCCCAGCAAGTGTCT | |
| B250E21-HR | | STS | | | CCTGGCTGGAGATAGGAT | CTTCCCCTCTGCCTATGT | |
| B250E21-HL | | STS | | | GGCACGTACTTCCTACCA | GGTGCTTCTTACAGGCAA | |
| B248C16-HR | | STS | | | ACCCAGGCTGGTGTGT | ACTGAGTTAATTATCACTCCCCT | |
| B248C16-HL | | STS | | | GATGCATTTTGCTTCACC | TCTGCTTTTAGAGCTGTTAGC | |
| B160D8-HR | | STS | | | TCAAGCTTCAAAGAGCAGA | GGAGTACATCCCAGGACC | |
| B539L7-HR | | STS | | | TGGTGCTTTTAAATCCAGA | CTCCCTTACTTACTTGCATTG | |
| B473O3-HL | | STS | | | TCTTCTCCCAGGGAATCT | TTTATGTCCCCTGAGCAC | |
| AFMa190xd9 | D11S4D95 | STS | GDB:606064 | 0.183 | TCCCTGGCTATCTTGAATC | CTTGACTGGGTCCACG | |
| ARRB1(2) | | STS | | | CGAGACGCCAGTAGATACCA | CATCCTCCATGCCTTTCAGT | |
| ARRB1(1) | | STS | | | AGTTCCAGAGAACGAGACGC | CTTGTCATCCTCCATGCCTT | |
| P102F3S | | STS | GDB:6054145 | | GAGCGTGAGAGGTTGAGGAG | AAACAAACTCCAGACGCACC | |
| N172A | | STS | GDB:6054146 | 0.208 | CTGAACCACTACCTGTATGACCTG | CTAACTACTTACTCCTACAGGGCCC | |
| NBDA | | STS | GDB:6054147 | 0.23 | GAAGCATTTCAATACTTTAACTG | CCACTCCAGTGCACCCAATC | |
| cCI11-44A | | STS | GDB:6054148 | 0.239 | CTTCTCCTGGCCACTCTGAC | GGTTTACCTTTGAATCCCAGC | |
| CN1677-2A | | STS | GDB:6054149 | 0.271 | TGAGGATGAATGAGCACATAGG | TTTGTGGTCCATTGAGTAGGC | |
| cCI11-5248 | | STS | GDB:6054150 | 0.221 | AGGGGAAGGAATGTGCTTGG | TTCGGCTGAGCGGGCAGTGT | |
| P117F3T | | STS | GDB:6054151 | 0.168 | ATTGAAGGTCCTCCAAAAGAATGCTG | AGAACGTCAACATATCTTTTTGGGGGACACA | |
| ARRB1(3) | | Gene | | | TTGTATTTGAGGACTTTGCTCG | CGGTACCATCCTCCTCTTCC | |
| B215J11-HL | | STS | | 0.122 | TTTTTGCCTCATCTATGCCC | GGGTGACAGAGCAAGACTCC | |
| B317G1-HR | | STS | | | TTGCTCAAGTTCTCCTGG | ACCTTGTTTTGAGGGGAG | |
| B317G1-HL | | STS | | | CTTGGCTATTTGGACAGG | GGGCATTTACTCACTTGC | |
| B292J18-HR | | STS | | | CTTGTGTCAGTTGTCAGGG | TGGAATTGTTGTGTCTTGG | |
| B292J18-HR | | STS | | | CTTGTGTCAGTTGTCAGGG | TGGAATTGTTGTGTCTTGG | |
| B10A18-HL | | STS | | | CCAGTTCCACTGGATGTT | ATGGGCTGTGTTTCTCAA | |
| B10A18-HR | | STS | | | CTGCCTATCCCTGGACTT | AGTTTGTCCCTAGTGCCC | |
| B527D12-HL | | STS | | | CAACACGTCTGACATCCAT | GGATAGTGCACACACCA | |
| B372J11-HR | | STS | | | TGGGTGGTACTATTGTTCCCAT | AGTTCCAGCCCCCTTACCAG | |
| B372J11-HL | | STS | | | GGCCACTATCATCCCTGTGT | TTTCACATGGGAGAACACG | |
| B37E17-HR(GS) | | STS | | | ACAGTGACACTAGGGACGGG | TGCCAGGATGGAGATAACAA | |
| B37E17-HL(GS) | | STS | | | CCTGTGGCACACATATCACC | ACAACCAAGAATGGAGCCAC | |
| B34F22-HR(GS) | | STS | | | TGCTGTGTAACAAGTCCCCA | TGAACGGAGGACCTACCAAG | |
| B34F22-HL(GS) | | STS | | | GCAGGGTCCGACTCACTAAG | GCTGTGAGTTCCCTTTACGC | |
| B6488P22-HR1 | | STS | | | ACAGTGGGGACAAAGACAGG | TACAGGGCACCTCCCAGTAG | |
| B82A4-HR2 | | STS | | | TCTTCTGTTAAGGTTTCCCCC | TGTCTCAAACCTCCCTCTGC | |
| B648P22-HL | | STS | | | AACATATTTCCTCCCCAGCC | CAGTCCCAGCCAATGAGAAC | |
| B82L11-HL(GS) | | STS | | | CTCCTCTGCATGGGAGAATC | AGACCTGGGACCAGTCTGTG | |
| BJ86J13-HL(GS) | | STS | | | GGGAGACGACGTCACAAGAT | TGATGTTGGGAAGATGGTGA | |
| 144A24-HL | | STS | | | CAGGCATCTTCTATGTGCCA | GGGAGGCACAAGTTCTTTCA | |
| B82L11-HR(GS) | | STS | | | ACTTCGTGGCACTGAGTGTG | CCTTTCTTACGGATGAGGCA | |
| B86J13-HR | (GS) | | STS | | | GGCTGCTGAGCTCTTCTGAT | TGGGTCTCTCTGCCTGACTT |
| B82L11-HL2(GS) | | STS | | | TCACCTACTTCCAGCTTCCG | AGACCTGGACCAGTCTGTG | |
| B82L11-HL3(GS) | | STS | | | CTCCTCTGCATGGGAGAATC | AATTCAGGAGACCTGGGACC | |

[0109] Novel STSs were developed either from publicly available genomic sequence or from sequence-derived BAC insert ends. Primers were chosen using a script which automatically performs vector and repetitive sequence masking using Cross_match (P. Green, U. of Washington) and subsequent primer picking using Primer3 (Rozen, Skaletsky (1996, 1997). Primer3 is available at www.genome.wi.mit.edu/genome_software/other/primer3.html.

[0110] Polymerase chain reaction (PCR) conditions for each primer pair were initially optimized with respect to MgCl₂ concentration. The standard buffer was 10 mM Tris-HCl (pH 8.3), 50 mM KCl, MgCl₂, 0.2 mM each dNTP, 0.2 AM each primer, 2.7 ng/μl human DNA, 0.25 units of AmpliTaq (Perkin Elmer) and MgCl₂ concentrations of 1.0 mM, 1.5 mM, 2.0 mM or 2.4 mM. Cycling conditions included an initial denaturation at 94° C. for 2 minutes followed by 40 cycles at 94° C. for 15 seconds, 55° C. for 25 seconds, and 72° C. for 25 seconds followed by a final extension at 72° C. for 3 minutes. Depending on the results from the initial round of optimization the conditions were further optimized if necessary. Variables included increasing the annealing temperature to 58° C. or 60° C., increasing the cycle number to 42 and the annealing and extension times to 30 seconds, and using AmpliTaqGold (Perkin Elmer).

[0111] BAC clones (Kim et al, Genomics, 32:213-218 (1996), Shizuya et al, Proc. Natl. Acad. Sci. USA, 89:8794-8797 (1992)) containing STS markers of interest were obtained by PCR-based screening of DNA pools from a total human BAC library purchased from Research Genetics. DNA pools derived from library plates 1-596 were used corresponding to nine genomic equivalents of human DNA. The initial screening process involved PCR reactions of individual markers against superpools, i.e., a mixture of DNA derived from all BAC clones from eight 384-well library plates. For each positive superpool, plate (8), row (16) and column (24) pools were screened to identify a unique library address. PCR products were electrophoresed in 2% agarose gels (Sigma) containing 0.5 μg/ml ethidium bromide in 1×TBE at 150 volts for 45 min. The electrophoresis units used were the Model A3-1 systems from Owl Scientific Products. Typically, gels contained 10 tiers of lanes with 50 wells/tier. Molecular weight markers (100 bp ladder, Life Technologies, Bethesda, Md.) were loaded at both ends of the gel. Images of the gels were captured with a Kodak DC40 CCD camera and processed with Kodak ID software. The gel data were exported as tab delimited text files; names of the files included information about the library screened, the gel image files and the marker screened. These data were automatically imported using a customized Perl script into Filemaker™ PRO (Claris Corp.) databases for data storage and analysis. In cases where incomplete or ambiguous clone address information was obtained, additional experiments were performed to recover a unique, complete library address.

[0112] Recovery of clonal BAC cultures from the library involved streaking out a sample from the library well onto LB agar (Maniatis et al, Molecular Cloning: A Laboratory Manual., Cold Spring Harbor Laboratory, Cold Spring Harbor, N.Y. (1982)) containing 12.5 μg/ml chloramphenicol (Sigma). Two individual colonies and a portion of the initial streak quadrant were tested with appropriate STS markers by colony PCR for verification. Positive clones were stored in LB broth containing 12.5 μg/ml chloramphenicol and 15% glycerol at −70° C.

[0113] Several different types of DNA preparation methods were used for isolation of BAC DNA. The manual alkaline lysis miniprep protocol listed below (Maniatis et al, Molecular Cloning: A Laboratory Manual, Cold Spring Harbor Laboratory, Cold Spring Harbor, N.Y. (1982)) was successfully used for most applications, i.e., restriction mapping, CHEF gel analysis, FISH mapping, but was not successfully reproducible in endsequencing. The Autogen and Qiagen protocols were used specifically for BAC DNA preparation for endsequencing purposes.

[0114] Bacteria were grown in 15 ml Terrific Broth containing 12.5 μg/ml chloramphenicol in a 50 ml conical tube at 37° C. for 20 hrs with shaking at 300 rpm. The cultures were centrifuged in a Sorvall RT 6000 D at 3000 rpm (˜1800 g) at 4° C. for 15 min. The supernatant was then aspirated as completely as possible. In some cases cell pellets were frozen at −20° C. at this step for up to 2 weeks. The pellet was then vortexed to homogenize the cells and minimize clumping. 250 μl of PI solution (50 mM glucose, 15 mM Tris-HCl, pH 8, 10 mM EDTA, and 100 Ag/ml RNase A) was added and the mixture pipetted up and down to mix. The mixture was then transferred to a 2 ml Eppendorf tube. 350 ill of P2 solution (0.2 N NaOH, 1% SDS) was then added, the mixture mixed gently and incubated for 5 min. at room temperature. 350 μl of P3 solution (3 M KOAc, pH 5.5) was added and the mixture mixed gently until a white precipitate formed. The solution was incubated on ice for 5 min. and then centrifuged at 4° C. in a microfuge for 10 min. The supernatant was transferred carefully (avoiding the white precipitate) to a fresh 2 ml Eppendorf tube, and 0.9 ml of isopropanol was added, the solution mixed and left on ice for 5 min. The samples were centrifuged for 10 min., and the supernatant removed carefully. Pellets were washed in 70% ethanol and air dried for 5 min. Pellets were resuspended in 200 μl of TE8 (10 mM Tris-HCl, pH 8.0, 1.0 mM EDTA), and RNase A (Boehringer Mannheim) added to 100 μg/ml. Samples were incubated at 37° C. for 30 min., then precipitated by addition of C₂H₃O₂Na.3H₂O to 0.5 M and 2 volumes of ethanol. Samples were centrifuged for 10 min., and the pellets washed with 70% ethanol followed by air drying and dissolving in 50 μl TE8. Typical yields for this DNA prep were 3-5 μg/15 ml bacterial culture. Ten to 15 μl were used for HindIII restriction analysis; 5 μl was used for NotI digestion and clone insert sizing by CHEF gel electrophoresis.

[0115] BACs were inoculated into 15 ml of 2×LB Broth containing 12.5 μg/ml chloramphenicol in a 50 ml conical tube. 4 tubes were inoculated for each clone. Cultures were grown overnight (˜16 hr) at 37° C. with vigorous shaking (>300 rpm). Standard conditions for BAC DNA isolation were followed as recommended by the Autogen 740 manufacturer. 3 ml samples of culture were placed into Autogen tubes for a total of 60 ml or 20 tubes per clone. Samples were dissolved finally in 100 μl TE8 with 15 seconds of shaking as part of the Autogen protocol. After the Autogen protocol was finished DNA solutions were transferred from each individual tube and pooled into a 2 ml Eppendorf tube. Tubes with large amounts of debris (carry over from the pelleting debris step) were avoided. The tubes were then rinsed with 0.5 ml of TE8 successively and this solution added to the pooled material. DNA solutions were stored at 4° C.; clumping tended to occur upon freezing at −20° C. This DNA was either used directly for restriction mapping, CHEF gel analysis or FISH mapping or was further purified as described below for use in endsequencing reactions.

[0116] The volume of DNA solutions was adjusted to 2 ml with TE8, samples were then mixed gently and heated at 650 C for 10 min. The DNA solutions were then centrifuged at 4° C. for 5 min. and the supernatants transferred to a 15 ml conical tube. The NaCl concentration was then adjusted to 0.75 M (0.3 ml of 5 M NaCl to the 2 ml sample). The total volume was then adjusted to 6 ml with Qiagen column equilibration buffer (Buffer QBT). The supernatant containing the DNA was then applied to the column and allowed to enter by gravity flow. Columns were washed twice with 10 ml of Qiagen Buffer QC. Bound DNA was then eluted with four separate 1 ml aliquots of Buffer QF kept at 65° C. DNA was precipitated with 0.7 volumes of isopropanol (2.8 ml). Each sample was then transferred to 4 individual 2.2 ml Eppendorf tubes and incubated at room temperature for 2 hr or overnight. Samples were centrifuged in a microfuige for 10 min. at 4° C. The supernatant was removed carefully and 1 ml of 70% ethanol was added. Samples were centrifuged again and because the DNA pellets were often loose at this stage, the supernatant removed carefully. Samples were centrifuged again to concentrate remaining liquid which was removed with a micropipet tip. DNA pellets were then dried in a desiccator for 10 min. 20 μl of sterile distilled and deionized H₂O was added to each tube which was then placed at 4° C. overnight. The four 20 μl samples for each clone were pooled and the tubes rinsed with another 20 μl of sterile distilled and deionized H₂O for a final volume of 100 μl. Samples were then heated at 65° C. for 5 min. and then mixed gently. Typical yields were 2-5 μg/60 ml culture as assessed by NotI digestion and comparison with uncut lambda DNA.

[0117] 3 ml of LB Broth containing 12.5 μg/ml of chloramphenicol was dispensed into autoclaved Autogen tubes. A single tube was used for each clone. For inoculation, glycerol stocks were removed from −70° C. storage and placed on dry ice. A small portion of the glycerol stock was removed from the original tube with a sterile toothpick and transferred into the Autogen tube; the toothpick was left in the Autogen tube for at least two minutes before discarding. After inoculation the tubes were covered with tape making sure the seal was tight. When all samples were inoculated, the tube units were transferred into an Autogen rack holder and placed into a rotary shaker at 37° C. for 16-17 hours at 250 rpm. Following growth, standard conditions for BAC DNA preparation, as defined by the manufacturer, were used to program the Autogen. Samples were not dissolved in TE8 as part of the program and DNA pellets were left dry. When the program was complete, the tubes were removed from the output tray and 30 μl of sterile distilled and deionized H₂O was added directly to the bottom of the tube. The tubes were then gently shaken for 2-5 seconds and then covered with parafilm and incubated at room temperature for 1-3 hours. DNA samples were then transferred to an Eppendorf tube and used either directly for sequencing or stored at 4° C. for later use.

[0118] V. BAC Clone Characterization for Physical Mapping

[0119] DNA samples prepared either by manual alkaline lysis or the Autogen protocol were digested with HindIII for analysis of restriction fragment sizes. This data were used to compare the extent of overlap among clones. Typically 1-2 μg were used for each reaction. Reaction mixtures included: IX Buffer 2 (New England Biolabs), 0.1 mg/ml bovine serum albumin (New England Biolabs), 50 μg/ml RNase A (Boehringer Mannheim), and 20 units of HindIII (New England Biolabs) in a final volume of 25 μl. Digestions were incubated at 37° C. for 4-6 hours. BAC DNA was also digested with NotI for estimation of insert size by CHEF gel analysis (see below). Reaction conditions were identical to those for HindIII except that 20 units of NotI were used. Six μl of 6× Ficoll loading buffer containing bromphenol blue and xylene cyanol was added prior to electrophoresis.

[0120] HindIII digests were analyzed on 0.6% agarose (Seakem, FMC Bioproducts) in 1×TBE containing 0.5 μg/ml ethidium bromide. Gels (20 cm X 25 cm) were electrophoresed in a Model A4 electrophoresis unit (Owl Scientific) at 50 volts for 20-24 hrs. Molecular weight size markers included undigested lambda DNA, HindIII digested lambda DNA, and HaeIII digested _X174 DNA. Molecular weight markers were heated at 65° C. for 2 min. prior to loading the gel. Images were captured with a Kodak DC40 CCD camera and analyzed with Kodak ID software.

[0121] NotI digests were analyzed on a CHEF DRII (BioRad) electrophoresis unit according to the manufacturer's recommendations. Briefly, 1% agarose gels (BioRad pulsed field grade) were prepared in 0.5×TBE, equilibrated for 30 minutes in the electrophoresis unit at 14° C., and electrophoresed at 6 volts/cm for 14 hrs with circulation. Switching times were ramped from 10 sec to 20 sec. Gels were stained after electrophoresis in 0.5 μg/ml ethidium bromide. Molecular weight markers included undigested lambda DNA, HindIII digested lambda DNA, lambda ladder PFG ladder, and low range PFG marker (all from New England Biolabs).

[0122] BAC DNA prepared either by the manual alkaline lysis or Autogen protocols were labeled for FISH analysis using a Bioprime labeling kit (BioRad) according to the manufacturer's recommendation with minor modifications. Approximately 200 ng of DNA was used for each 50 μl reaction. 3 μl were analyzed on a 2% agarose gel to determine the extent of labeling. Reactions were purified using a Sephadex G50, spin column prior to in situ hybridization. Metaphase FISH was performed as described (Ma et al, Cytogenet. Cell Genet., 74:266-271 (1996)).

[0123] VI. BAC Endsequencing

[0124] The sequencing of BAC insert ends utilized DNA prepared by either of the two methods described above. The DYEnamic energy transfer primers and Dynamic Direct cycle sequencing kits from Amersham were used for sequencing reactions. Ready made sequencing mix including the M13-40 forward sequencing primer was used (Catalog # US79730) for the T7 BAC vector terminus; ready made sequencing mix (Catalog # US79530) was mixed with the M13-28 reverse sequencing primer (Catalog # US79339) for the SP6 BAC vector terminus. The sequencing reaction mixes included one of the four fluorescently labeled dye-primers, one of the four dideoxy termination mixes, dNTPs, reaction buffer, and Thermosequenase. For each BAC DNA sample, 3 μl of the BAC DNA sample was aliquoted to 4 PCR strip tubes. 2 μl of one of the four dye primer/termination mix combinations was then added to each of the four tubes. The tubes were then sealed and centrifuged briefly prior to PCR. Thermocycling conditions involved a 1 minute denaturation at 95° C., 15 second annealing at 45° C., and extension for 1 minute at 70° C. for 35 total cycles. After cycling the plates were centrifuged briefly to collect all the liquid to the bottom of the tubes. 5 μl of sterile distilled and deionized H₂O was then added into each tube, the plates sealed and centrifuged briefly again. The four samples for each BAC were then pooled together. DNA was then precipitated by adding 1.5 μl of 7.5 M NH₄OAc and 100 μl of −20° C. 100% ethanol to each tube. Samples were mixed by pipetting up and down once. The plates were then sealed and incubated on ice for 10 minutes. Plates were centrifuged in a table top Haraeus centrifuge at 4000 rpm (3,290 g) for 30 minutes at 4° C. to recover the DNA. The supernatant was removed and excess liquid blotted onto paper towels. Pellets were washed by adding 100 μl of-20° C. 70% ethanol into each tube and recentrifuging at 4000 rpm (3,290 g) for 10 minutes at 4° C. The supernatant was removed and excess liquid again removed by blotting on a paper towel. Remaining traces of liquid were removed by placing the plates upside down over a paper towel and centrifuging only until the centrifuge reached 800 rpm. Samples were then air dried at room temperature for 30 min. Tubes were capped and stored dry at −20° C. until electrophoresis. Immediately prior to electrophoresis the DNA was dissolved in 1.5 μl of Amersham loading dye. Plates were then sealed and centrifuged at 2000 rpm (825 g). The plates were then vortexed on a plate shaker for 1-2 minutes. Samples were then recentrifuged at 2000 rpm (825 g) briefly. Samples were then heated at 65° C. for 2 min. and immediately placed on ice. Standard gel electrophoresis was performed on ABI 377 fluorescent sequencers according to the manufacturer's recommendation.

[0125] VII. Sub-Cloning and Sequencing of HBM BAC DNA

[0126] The physical map of the Zmax1 gene region provides a set of BAC clones that contain within them the Zmax1 gene and the HBM gene. DNA sequencing of several of the BACs from the region has been completed. The DNA sequence data is a unique reagent that includes data that one skilled in the art can use to identify the Zmax1 gene and the HBM gene, or to prepare probes to identify the gene(s), or to identify DNA sequence polymorphisms that identify the gene(s).

[0127] BAC DNA was isolated according to one of two protocols, either a Qiagen purification of BAC DNA (Qiagen, Inc. as described in the product literature) or a manual purification which is a modification of the standard alkaline lysis/Cesium Chloride preparation of plasmid DNA (see e.g., Ausubel et al, Current Protocols in Molecular Biology, John Wiley & Sons (1997)). Briefly for the manual protocol, cells were pelleted, resuspended in GTE (50 mM glucose, 25 mM Tris-Cl (pH 8), 10 mM EDTA) and lysozyme (50 mg/ml solution), followed by NaOH/SDS (1% SDS/0.2 N NaOH) and then an ice-cold solution of 3 M KOAc (pH 4.5-4.8). RnaseA was added to the filtered supernatant, followed by Proteinase K and 20% SDS. The DNA was then precipitated with isopropanol, dried and resuspended in TE (10 mM Tris, 1 mM EDTA (pH 8.0)). The BAC DNA was further purified by Cesium Chloride density gradient centrifugation (Ausubel et al, Current Protocols in Molecular Biology, John Wiley & Sons (1997)).

[0128] Following isolation, the BAC DNA was sheared hydrodynamically using an HPLC (Hengen, Trends in Biochem. Sci., 22:273-274 (1997)) to an insert size of 2000-3000 bp. After shearing, the DNA was concentrated and separated on a standard 1% agarose gel. A single fraction, corresponding to the approximate size, was excised from the gel and purified by electroelution (Sambrook et al, Molecular Cloning: A Laboratory Manual, Cold Spring Harbor Laboratory, Cold Spring, N.Y. (1989)).

[0129] The purified DNA fragments were then blunt-ended using T4 DNA polymerase. The blunt-ended DNA was then ligated to unique BstXI-linker adapters (5′ GTCTTCACCACGGGG and 5′ GTGGTGAAGAC in 100-1000 fold molar excess). These linkers were complimentary to the BstXI-cut pMPX vectors (constructed by the inventors), while the overhang was not self-complimentary. Therefore, the linkers would not concatemerize nor would the cut-vector religate itself easily. The linker-adapted inserts were separated from the unincorporated linkers on a 1% agarose gel and purified using GeneClean (BIO 101, Inc.). The linker-adapted insert was then ligated to a modified pBlueScript vector to construct a “shotgun” subclone library. The vector contained an out-of-frame lacZ gene at the cloning site which became in-frame in the event that an adapter-dimer is cloned, allowing these to be avoided by their blue-color.

[0130] All subsequent steps were based on sequencing by ABI377 automated DNA sequencing methods. Only major modifications to the protocols are highlighted. Briefly, the library was then transformed into DH5α: competent cells (Life Technologies, Bethesda, Md., DH5 a transformation protocol). It was assessed by plating onto antibiotic plates containing ampicillin and IPTG/Xgal. The plates were incubated overnight at 37° C. Successful transformants were then used for plating of clones and picking for sequencing. The cultures were grown overnight at 37°. DNA was purified using a silica bead DNA preparation (Ng et al, Nucl. Acids Res., 24:5045-5047 (1996)) method. In this manner, 25 μg of DNA was obtained per clone.

[0131] These purified DNA samples were then sequenced using ABI dye-terminator chemistry. The ABI dye terminator sequence reads were run on ABI377 machines and the data was directly transferred to UNIX machines following lane tracking of the gels. All reads were assembled using PHRAP (P. Green, Abstracts of DOE Human Genome Program Contractor-Grantee Workshop V, January 1996, p.157) with default parameters and quality scores. The initial assembly was done at 6-fold coverage and yielded an average of 8-15 contigs. Following the initial assembly, missing mates (sequences from clones that only gave one strand reads) were identified and sequenced with ABI technology to allow the identification of additional overlapping contigs. Primers for walking were selected using a Genome Therapeutics program Pick_primer near the ends of the clones to facilitate gap closure. These walks were sequenced using the selected clones and primers. Data were reassembled with PHRAP into sequence contigs.

[0132] VIII. Gene Identification by Computational Methods

[0133] Following assembly of the BAC sequences into contigs, the contigs were subjected to computational analyses to identify coding regions and regions bearing DNA sequence similarity to known genes. This protocol included the following steps.

[0134] 1. Degap the contigs: the sequence contigs often contain symbols (denoted by a period symbol) that represent locations where the individual ABI sequence reads have insertions or deletions. Prior to automated computational analysis of the contigs, the periods were removed. The original data was maintained for future reference.

[0135] 2. BAC vector sequences were “masked” within the sequence by using the program cross match (Phil Green, http:chimera.biotech.washington.edu\UWGC). Since the shotgun libraries construction detailed above leaves some BAC vector in the shotgun libraries, this program was used to compare the sequence of the BAC contigs to the BAC vector and to mask any vector sequence prior to subsequent steps. Masked sequences were marked by an “X” in the sequence files, and remained inert during subsequent analyses.

[0136] 3. E. coli sequences contaminating the BAC sequences were masked by comparing the BAC contigs to the entire E. coli DNA sequence.

[0137] 4. Repetitive elements known to be common in the human genome were masked using cross match. In this implementation of crossmatch, the BAC sequence was compared to a database of human repetitive elements (Jerzy Jerka, Genetic Information Research Institute, Palo Alto, Calif.). The masked repeats were marked by X and remained inert during subsequent analyses.

[0138] 5. The location of exons within the sequence was predicted using the MZEF computer program (Zhang, Proc. Natl. Acad. Sci., 94:565-568 (1997)).

[0139] 6. The sequence was compared to the publicly available unigene database (National Center for Biotechnology Information, National Library of Medicine, 38A, 8N905, 8600 Rockville Pike, Bethesda, Md. 20894; www.ncbi.nlm.nih.gov) using the blastn2 algorithm (Altschul et al, Nucl. Acids Res., 25:3389-3402 (1997)). The parameters for this search were: E=0.05, v=50, B=50 (where E is the expected probability score cutoff, V is the number of database entries returned in the reporting of the results, and B is the number of sequence alignments returned in the reporting of the results (Altschul et al, J. Mol. Biol., 215:403-410 (1990)).

[0140] 7. The sequence was translated into protein for all six reading frames, and the protein sequences were compared to a non-redundant protein database compiled from Genpept Swissprot PIR (National Center for Biotechnology Information, National Library of Medicine, 38A, 8N905, 8600 Rockville Pike, Bethesda, Md. 20894; www.ncbi.nlm.nih.gov). The parameters for this search were E=0.05, V=50, B=50, where E, V, and B are defined as above.

[0141] 8. The BAC DNA sequence was compared to the database of the cDNA clones derived from direct selection experiments (described below) using blastn2 (Altschul et al, Nucl. Acids. Res., 25:3389-3402 (1997)). The parameters for this search were E=0.05, V=250, B=250, where E, V, and B are defined as above.

[0142] 9. The BAC sequence was compared to the sequences of all other BACs from the HBM region on chromosome 11q12-13 using blastn2 (Altschul et al, Nucl. Acids. Res., 25:3389-3402 (1997)). The parameters for this search were E=0.05, V=50, B=50, where E, V, and B are defined as above.

[0143] 10. The BAC sequence was compared to the sequences derived from the ends of BACs from the HBM region on chromosome 11q12-13 using blastn2 (Altschul et al, Nucl. Acids. Res., 25:3389-3402 (1997)). The parameters for this search were E=0.05, V=50, B=50, where E, V, and B are defined as above.

[0144] 11. The BAC sequence was compared to the Genbank database (National Center for Biotechnology Information, National Library of Medicine, 38A, 8N905, 8600 Rockville Pike, Bethesda, Md. 20894; www.ncbi.nlm.nih.gov) using blastn2 (Altschul et al, Nuc. Acids. Res., 25:3389-3402 (1997)). The parameters for this search were E=0.05, V=50, B=50, where E, V, and B are defined as above.

[0145] 12. The BAC sequence was compared to the STS division of Genbank database (National Center for Biotechnology Information, National Library of Medicine, 38A, 8N905, 8600 Rockville Pike, Bethesda, Md. 20894; www.ncbi.nlm.nih.gov) using blastn2 (Altschul et al, 1997). The parameters for this search were E=0.05, V=50, B=50, where E, V, and B are defined as above.

[0146] 13. The BAC sequence was compared to the Expressed Sequence (EST) Tag Genbank database (National Center for Biotechnology Information, National Library of Medicine, 38A, 8N905, 8600 Rockville Pike, Bethesda, Md. 20894; www.ncbi.nlm.nih.gov) using blastn2 (Altschul et al, Nucl. Acids. Res., 25:3389-3402 (1997)). The parameters for this search were E=0.05, V=250, B=250, where E, V, and B are defined as above.

[0147] IX. Gene Identification by Direct cDNA Selection

[0148] Primary linkered cDNA pools were prepared from bone marrow, calvarial bone, femoral bone, kidney, skeletal muscle, testis and total brain. Poly (A)+ RNA was prepared from calvarial and femoral bone tissue (Chomczynski et al, Anal. Biochem., 162:156-159 (1987); D'Alessio et al, Focus, 9:1-4 (1987)) and the remainder of the mRNA was purchased from Clontech (Palo Alto, Calif.). In order to generate oligo(dT) and random primed cDNA pools from the same tissue, 2.5 μg mRNA was mixed with oligo(dT) primer in one reaction and 2.5 μg mRNA was mixed with random hexamers in another reaction, and both were converted to first and second strand cDNA according to manufacturers recommendations (Life Technologies, Bethesda, Md.). Paired phosphorylated cDNA linkers (see sequence below) were annealed together by mixing in a 1:1 ratio (10 μg each) incubated at 65° C. for five minutes and allowed to cool to room temperature.

[0149] Paired Linkers Oligo1/2

| | |
|---|---|
| OLIGO 1: | |
| 5′CTG AGC GGA ATT CGT GAG ACC3′ | (SEQ ID NO:12) |
| OLIGO 2: | |
| 5′TTG GTC TCA CGT ATT CCG CTC GA3′ | (SEQ ID NO:13) |

[0150] Paired Linkers Oligo3/4

| | |
|---|---|
| OLIGO 3: | |
| 5′CTC GAG AAT TCT GGA TCC TC3′ | (SEQ ID NO:14) |
| OLIGO 4: | |
| 5′TTG AGG ATC CAG AAT TCT CGA G3′ | (SEQ ID NO:15) |

[0151] Paired Linkers Oligo5/6

| | |
|---|---|
| OLIGO 5: | |
| 5′TGT ATG CGA ATT CGC TGC GCG3′ | (SEQ ID NO:16) |
| OLIGO 6: | |
| 5′TTC GCG CAG CGA ATT CGC ATA CA3′ | (SEQ ID NO:17) |

[0152] Paired Linkers Oligo7/8

| | |
|---|---|
| OLIGO 7: | |
| 5′GTC CAC TGA ATT CTC AGT GAG3′ | (SEQ ID NO:18) |
| OLIGO 8: | |
| 5′TTG TCA CTG AGA ATT CAG TGG AC3′ | (SEQ ID NO:19) |

[0153] Paired Linkers Oligo11/12

| | |
|---|---|
| OLIGO 11: | |
| 5′GAA TCC GAA TTC CTG GTC AGC3′ | (SEQ ID NO:20) |
| OLIGO 12: | |
| 5′TTG CTG ACC AGG AAT TCG GAT TC3′ | (SEQ ID NO:21) |

[0154] Linkers were ligated to all oligo(dT) and random primed cDNA pools (see below) according to manufacturers instructions (Life Technologies, Bethesda, Md.).

[0155] Oligo 1/2 was ligated to oligo(dT) and random primed cDNA pools prepared from bone marrow. Oligo 3/4 was ligated to oligo(dT) and random primed cDNA pools prepared from calvarial bone. Oligo 5/6 was ligated to oligo(dT) and random pruned cDNA pools prepared from brain and skeletal muscle. Oligo 7/8 was ligated to oligo(dT) and random primed cDNA pools prepared from kidney. Oligo 11/12 was ligated to oligo(dT) and random primed cDNA pools prepared from femoral bone.

[0156] The cDNA pools were evaluated for length distribution by PCR amplification using 1 μl of a 1:1, 1:10, and 1:100 dilution of the ligation reaction, respectively. PCR reactions were performed in a Perkin Elmer 9600, each 25 μl volume reaction contained 1 μl of DNA, 10 mM Tris-HCl (pH 8.3), 50 mM KCl, 1.5 mM MgCl₂, 0.01% gelatin, 200 mM each dNTPs, 10 μM primer and 1 unit Taq DNA polymerase (Perkin Elmer) and was amplified under the following conditions: 30 seconds at 94° C., 30 seconds at 60° C. and 2 minutes at 72° C. for 30 cycles. The length distribution of the amplified cDNA pools were evaluated by electrophoresis on a 1% agarose gel. The PCR reaction that gave the best representation of the random primed and oligo(dt) primed cDNA pools was scaled up so that 2-3 μg of each cDNA pool was produced. The starting cDNA for the direct selection reaction comprised of 0.5 μg of random primed cDNAs mixed with 0.5 μg of oligo(dT) primed cDNAs.

[0157] The DNA from the 54 BACs that were used in the direct cDNA selection procedure was isolated using Nucleobond AX columins as described by the manufacturer (The Nest Group, Inc.).

[0158] The BACs were pooled in equimolar amounts and 1 μg of the isolated genomic DNA was labeled with biotin 16-UTP by nick translation in accordance with the manufacturers instructions (Boehringer Mannheim). The incorporation of the biotin was monitored by methods that could be practiced by one skilled in the art (Del Mastro and Lovett, Methods in Molecular Biology, Humana Press Inc., NJ (1996)).

[0159] Direct cDNA selection was performed using methods that could be practiced by one skilled in the art (Del Mastro and Lovett, Methods in Molecular Biology, Humana Press Inc., NJ (11996)). Briefly, the cDNA pools were multiplexed in two separate reactions: In one reaction cDNA pools from bone marrow, calvarial bone, brain and testis were mixed, and in the other cDNA pools from skeletal muscle, kidney and femoral bone were mixed. Suppression of the repeats, yeast sequences and plasmid in the cDNA pools was performed to a Cot of 20. 100 ng of biotinylated BAC DNA was mixed with the suppressed cDNAs and hybridized in solution to a Cot of 200. The biotinylated DNA and the cognate cDNAs was captured on streptavidin-coated paramagnetic beads. The beads were washed and the primary selected cDNAs were eluted. These cDNAs were PCR amplified and a second round of direct selection was performed. The product of the second round of direct selection is referred to as the secondary selected material. A Galanin cDNA clone, previously shown to map to 11q12-13 (Evans, Genomics, 18:473-477 (1993)), was used to monitor enrichment during the two rounds of selection.

[0160] The secondary selected material from bone marrow, calvarial bone, femoral bone, kidney, skeletal muscle, testis and total brain was PCR amplified using modified primers of oligos 1, 3, 5, 7 and 11, shown below, and cloned into the UDG vector pAMP10 (Life Technologies, Bethesda, Md.), in accordance with the manufacturer's recommendations.

[0161] Modified Primer Sequences:

| | | |
|---|---|---|
| Oligo1-CUA: | 5′CUA CUA CUA CUA CTG AGC GGA ATT CGT GAG ACC3′ | (SEQ ID NO:22) |
| Oligo3-CUA: | 5′CUA CUA CUA CUA CTC GAG AAT TCT GGA TCC TC3′ | (SEQ ID NO:23) |
| Oligo5-CUA: | 5′CUA CUA CUA CUA TGT ATG CGA ATT CGC TGC GCG3′ | (SEQ ID NO:24) |
| Oligo7-CUA: | 5′CUA CUA CUA CUA GTC CAC TGA ATT CTC AGT GAG3′ | (SEQ ID NO:25) |
| Oligo11-CUA: | 5′CUA CUA CUA CUA GAA TCC GAA TTC CTG GTC AGC3′ | (SEQ ID NO:26) |

[0162] The cloned secondary selected material, from each tissue source, was transformed into MAX Efficiency DH5 a Competent Cells (Life Technologies, Bethesda, Md.) as recommended by the manufacturer. 384 colonies were picked from each transformed source and arrayed into four 96 well microtiter plates. All secondarily selected cDNA clones were sequenced using M13 dye primer terminator cycle sequencing kit (Applied Biosystems), and the data collected by the ABI 377 automated fluorescence sequencer (Applied Biosystems). All sequences were analyzed using the BLASTN, BLASTX and FASTA programs (Altschul et al, J. Mol. Biol., 215:403-410 (1990), Altschul et al, Nucl. Acids. Res., 25:3389-3402 (1997)). The cDNA sequences were compared to a database containing sequences derived from human repeats, mitochondrial DNA, ribosomal RNA, E. coli DNA to remove background clones from the dataset using the program cross_match. A further round of comparison was also performed using the program BLASTN2 against known genes (Genbank) and the BAC sequences from the HBM region. Those cDNAs that were >90% homologous to these sequences were filed according to the result and the data stored in a database for further analysis. cDNA sequences that were identified but did not have significant similarity to the BAC sequences from the HBM region or were eliminated by crossmatch were hybridized to nylon membranes which contained the BACs from the HBM region, to ascertain whether they hybridized to the target.

[0163] Hybridization analysis was used to map the cDNA clones to the BAC target that selected them. The BACs that were identified from the HBM region were arrayed and grown into a 96 well microtiter plate. LB agar containing 25 μg/ml kanamycin was poured into 96 well microtiter plate lids. Once the agar had solidified, pre-cut Hybond N+ nylon membranes (Amersham) were laid on top of the agar and the BACs were stamped onto the membranes in duplicate using a hand held 96 well replica plater (V&P Scientific, Inc.). The plates were incubated overnight at 37° C. The membranes were processed according to the manufacturers recommendations.

[0164] The cDNAs that needed to be mapped by hybridization were PCR amplified using the relevant primer (oligos 1, 3, 5, 7 and 11) that would amplify that clone. For this PCR amplification, the primers were modified to contain a Tinkered digoxigenin molecule at the 5′ of the oligonucleotide. The PCR amplification was performed under the same conditions as described in Preparation of cDNA Pools (above). The PCR products were evaluated for quality and quantity by electrophoresis on a 1% agarose gel by loading 5 μl of the PCR reaction. The nylon membranes containing the stamped BACs were individually pre-hybridized in 50 ml conical tubes containing 10 ml of hybridization solution (5×SSPE, 0.5× Blotto, 2.5% SDS and 1 mM EDTA (pH 8.0)). The 50 ml conical tubes were placed in a rotisserie oven (Robbins Scientific) for 2 hours at 65° C. Twenty-five ng of each cDNA probe was denatured and added into individual 50 ml conical tubes containing the nylon membrane and hybridization solution. The hybridization was performed overnight at 65° C. The filters were washed for 20 minutes at 65° C. in each of the following solutions: 3×SSPE, 0.1% SDS; 1×SSPE, 0.1% SDS and 0.1×SSPE, 0.1% SDS.

[0165] The membranes were removed from the 50 ml conical tubes and placed in a dish. Acetate sheets were placed between each membrane to prevent them from sticking to each other. The incubation of the membranes with the Anti-DIG-AP and CDP-Star was performed according to manufacturers recommendations (Boehringer Mannheim). The membranes were wrapped in Saran wrap and exposed to Kodak Bio-Max X-ray film for 1 hour.

[0166] X. cDNA Cloning and Expression Analysis

[0167] To characterize the expression of the genes identified by direct cDNA selection and genomic DNA sequencing in comparison to the publicly available databases, a series of experiments were performed to further characterize the genes in the HBM region. First, oligonucleotide primers were designed for use in the polymerase chain reaction (PCR) so that portions of a cDNA, EST, or genomic DNA could be amplified from a pool of DNA molecules (a cDNA library) or RNA population (RT-PCR and RACE). The PCR primers were used in a reaction containing genomic DNA to verify that they generated a product of the size predicted based on the genomic (BAC) sequence. A number of cDNA libraries were then examined for the presence of the specific cDNA or EST. The presence of a fragment of a transcnrption unit in a particular cDNA library indicates a high probability that additional portions of the same transcription unit will be present as well.

[0168] A critical piece of data that is required when characterizing novel genes is the length, in nucleotides, of the processed transcript or messenger RNA (mRNA). One skilled in the art primarily determines the length of an mRNA by Northern blot hybridization (Sambrook et al, Molecular Cloning: A Laboratory Manual, Cold Spring Harbor Laboratory, Cold Spring Harbor N.Y. (1989)). Groups of ESTs and direct-selected cDNA clones that displayed significant sequence similarity to sequenced BACs in the critical region were grouped for convenience into approximately 30 kilobase units. Within each 30 kilobase unit there were from one up to fifty ESTs and direct-selected cDNA clones which comprised one or more independent transcription units. One or more ESTs or direct-selected cDNAs were used as hybridization probes to determine the length of the mRNA in a variety of tissues, using commercially available reagents (Multiple Tissue Northern blot; Clontech, Palo Alto, Calif.) under conditions recommended by the manufacturer.

[0169] Directionally cloned cDNA libraries from femoral bone, and calvarial bone tissue were constructed by methods familiar to one skilled in the art (for example, Soares in Automated DNA Sequencing and Analysis, Adams, Fields and Venter, Eds., Academic Press, NY, pages 110-114 (1994)). Bones were initially broken into fragments with a hammer, and the small pieces were frozen in liquid nitrogen and reduced to a powder in a tissue pulverizer (Spectrum Laboratory Products). RNA was extracted from the powdered bone by homogenizing the powdered bone with a standard Acid Guanidinium Thiocyanate-Phenol-Chloroform extraction buffer (e.g. Chomczynski and Sacchi, Anal. Biochem., 162:156-159 (1987)) using a polytron homogenizer (Brinkman Instruments). Additionally, human brain and lung total RNA was purchased from Clontech. PolyA RNA was isolated from total RNA using dynabeads-dT according to the manufacturer's recommendations (Dynal, Inc.).

[0170] First strand cDNA synthesis was initiated using an oligonucleotide primer with the sequence: 5′-AACTGGAAGAATTCGCGGCCGCAGGAATTTTTTTTT TTTTTTTTT-3′ (SEQ ID NO:27). This primer introduces a NotI restriction site (underlined) at the 3′ end of the cDNA. First and second strand synthesis were performed using the “one-tube” cDNA synthesis kit as described by the anufacturer (Life Technologies, Bethesda, Md.). Double stranded cDNAs were treated with T4 polynucleotide kinase to ensure that the ends of the molecules were blunt (Soares in Automated DNA Sequencing and Analysis, Adams, Fields and Venter, Eds., Academic Press, NY, pages 110-114 (1994)), and the blunt ended cDNAs were then size selected by a Biogel column (Huynh et al in DNA Cloning, Vol. 1, Glover, Ed., IRL Press, Oxford, pages 49-78 (1985)) or with a size-sep 400 sepharose column (Pharmacia, catalog # 27-5105-01). Only cDNAs of 400 base pairs or longer were used in subsequent steps. EcoRI adapters (sequence: 5′ OH-AATTCGGCACGAG-OH 3′ (SEQ ID NO:28), and 5′ p-CTCGTGCCG-OH 3′ (SEQ ID NO:29)) were then ligated to the double stranded cDNAs by methods familiar to one skilled in the art (Soares, 1994). The EcoRI adapters were then removed from the 3′ end of the cDNA by digestion with NotI (Soares, 1994). The cDNA was then ligated into the plasmid vector pBluescript II KS+ (Stratagene, La Jolla, Calif.), and the ligated material was transformed into E. coli host DH10B or DH12S by electroporation methods familiar to one skilled in the art (Soares, 1994). After growth overnight at 37° C., DNA was recovered from the E. coli colonies after scraping the plates by processing as directed for the Mega-prep kit (Qiagen, Chatsworth, Calif.). The quality of the cDNA libraries was estimated by counting a portion of the total numbers of primary transformants and determining the average insert size and the percentage of plasmids with no cDNA insert. Additional cDNA libraries (human total brain, heart, kidney, leukocyte, and fetal brain) were purchased from Life Technologies, Bethesda, Md.

[0171] cDNA libraries, both oligo (dT) and random hexamer (N₆) primed, were used for isolating cDNA clones transcribed within the HBM region: human bone, human brain, human kidney and human skeletal muscle (all cDNA libraries were made by the inventors, except for skeletal muscle (dT) and kidney (dT) cDNA libraries). Four 10×10 arrays of each of the cDNA libraries were prepared as follows: the cDNA libraries were titered to 2.5×10⁶ using primary transformants. The appropriate volume of frozen stock was used to inoculate 2 L of LB/ampicillin (100 mg/ml). This inoculated liquid culture was aliquotted into 400 tubes of 4 ml each. Each tube contained approximately 5000 cfu. The tubes were incubated at 30° C. overnight with gentle agitation. The cultures were grown to an OD of 0.7-0.9. Frozen stocks were prepared for each of the cultures by aliquotting 100 μl of culture and 300 μl of 80% glycerol. Stocks were frozen in a dry ice/ethanol bath and stored at −70° C. The remaining culture was DNA prepared using the Qiagen (Chatsworth, Calif.) spin miniprep kit according to the manufacturer's instructions. The DNAs from the 400 cultures were pooled to make 80 column and row pools. The cDNA libraries were determined to contain HBM cDNA clones of interest by PCR. Markers were designed to amplify putative exons. Once a standard PCR optimization was performed and specific cDNA libraries were determined to contain cDNA clones of interest, the markers were used to screen the arrayed library. Positive addresses indicating the presence of cDNA clones were confirmed by a second PCR using the same markers.

[0172] Once a cDNA library was identified as likely to contain cDNA clones corresponding to a specific transcript of interest from the HBM region, it was manipulated to isolate the clone or clones containing cDNA inserts identical to the EST or direct-selected cDNA of interest. This was accomplished by a modification of the standard “colony screening” method (Sambrook et al, Molecular Cloning: A Laboratory Manual, Cold Spring Harbor Laboratory, Cold Spring Harbor N.Y. (1989)). Specifically, twenty 150 mm LB+ampicillin agar plates were spread with 20,000 colony forming units (cfu) of cDNA library and the colonies allowed to grow overnight at 37° C. Colonies were transferred to nylon filters (Hybond from Amersham, or equivalent) and duplicates prepared by pressing two filters together essentially as described (Sambrook et al, Molecular Cloning: A Laboratory Manual, Cold Spring Harbor Laboratory, Cold Spring Harbor N.Y. (1989)). The “master” plate was then incubated an additional 6-8 hours to allow the colonies to grow back. The DNA from the bacterial colonies was then affixed to the nylon filters by treating the filters sequentially with denaturing solution (0.5 N NaOH, 1.5 M NaCl) for two minutes, neutralization solution (0.5 M Tris-Cl pH 8.0, 1.5 M NaCl) for two minutes (twice). The bacterial colonies were removed from the filters by washing in a solution of 2×SSC/0.1% SDS for one minute while rubbing with tissue paper. The filters were air dried and baked under vacuum at 80° C. for 1-2 hours.

[0173] A cDNA hybridization probe was prepared by random hexamer labeling (Fineberg and Vogelstein, Anal. Biochem., 132:6-13 (1983)) or by including gene-specific primers and no random hexamers in the reaction (for small fragments). Specific activity was calculated and was >5×10⁸ cpm/10⁸ μg of cDNA. The colony membranes were then prewashed in 10 mM Tris-Cl pH 8.0, 1 M NaCl, 1 mM EDTA, 0.1% SDS for 30 minutes at 55° C. Following the prewash, the filters were prehybridized in >2 ml/filter of 6×SSC, 50% deionized formamide, 2% SDS, 5× Denhardt's solution, and 100 mg/ml denatured salmon sperm DNA, at 42° C. for 30 minutes. The filters were then transferred to hybridization solution (6×SSC, 2% SDS, 5× Denhardt's, 100 mg/ml denatured salmon sperm DNA) containing denatured α³²P-dCTP-labeled cDNA probe and incubated at 42° C. for 16-18 hours.

[0174] After the 16-18 hour incubation, the filters were washed under constant agitation in 2×SSC, 2% SDS at room temperature for 20 minutes, followed by two washes at 65° C. for 15 minutes each. A second wash was performed in 0.5×SSC, 0.5% SDS for 15 minutes at 65° C. Filters were then wrapped in plastic wrap and exposed to radiographic film for several hours to overnight. After film development, individual colonies on plates were aligned with the autoradiograph so that they could be picked into a 1 ml solution of LB Broth containing ampicillin. After shaking at 37° C. for 1-2 hours, aliquots of the solution were plated on 150 mm plates for secondary screening. Secondary screening was identical to primary screening (above) except that it was performed on plates containing 250 colonies so that individual colonies could be clearly identified for picking.

[0175] After colony screening with radiolabeled probes yielded cDNA clones, the clones were characterized by restriction endonuclease cleavage, PCR, and direct sequencing to confirm the sequence identity between the original probe and the isolated clone. To obtain the full-length cDNA, the novel sequence from the end of the clone identified was used to probe the library again. This process was repeated until the length of the cDNA cloned matches that estimated to be full-length by the northern blot analysis.

[0176] RT-PCR was used as another method to isolate full length clones. The cDNA was synthesized and amplified using a “Superscript One Step RT-PCR” kit (Life Technologies, Gaithersburg, Md.). The procedure involved adding 1.5 μg of RNA to the following: 25 μl of reaction mix provided which is a proprietary buffer mix with MgSO₄ and dNTP's, 1 μl sense primer (10 μM) and 1 S11 anti-sense primer (10 μM), 1 III reverse transcriptase and Taq DNA polymerase mix provided and autoclaved water to a total reaction mix of 50 pl. The reaction was then placed in a thermocycler for 1 cycle at 50° C. for 15 to 30 minutes, then 94° C. for 15 seconds, 55-60° C. for 30 seconds and 68-72° C. for 1 minute per kilobase of anticipated product and finally 1 cycle of 72° C. for 5-10 minutes. The sample was analyzed on an agarose gel. The product was excised from the gel and purified from the gel (GeneClean, Bio 101). The purified product was cloned in pCTNR (General Contractor DNA Cloning System, 5 Prime-3 Prime, Inc.) and sequenced to verify that the clone was specific to the gene of interest.

[0177] Rapid Amplification of cDNA ends (RACE) was performed following the manufacturer's instructions using a Marathon cDNA Amplification Kit (Clontech, Palo Alto, Calif.) as a method for cloning the 5′ and 3′ ends of candidate genes. cDNA pools were prepared from total RNA by performing first strand synthesis, where a sample of total RNA sample was mixed with a modified oligo (dT) primer, heated to 70° C., cooled on ice and followed by the addition of: 5×first strand buffer, 10 mM dNTP mix, and AMV Reverse Transcriptase (20 U/μl). The tube was incubated at 42° C. for one hour and then the reaction tube was placed on ice. For second strand synthesis, the following components were added directly to the reaction tube: 5× second strand buffer, 10 mM dNTP mix, sterile water, 20× second strand enzyme cocktail and the reaction tube was incubated at 16° C. for 1.5 hours. T4 DNA Polymerase was added to the reaction tube and incubated at 16° C. for 45 minutes. The second-strand synthesis was terminated with the addition of an EDTA/Glycogen mix. The sample was subjected to a phenol/chloroform extraction and an ammonium acetate precipitation. The cDNA pools were checked for quality by analyzing on an agarose gel for size distribution. Marathon cDNA adapters (Clontech) were then ligated onto the cDNA ends. The specific adapters contained priming sites that allowed for amplification of either 5′ or 3′ ends, depending on the orientation of the gene specific primer (GSP) that was chosen. An aliquot of the double stranded cDNA was added to the following reagents: 10 μM Marathon cDNA adapter, 5×DNA ligation buffer, T4 DNA ligase. The reaction was incubated at 16° C. overnight. The reaction was heat inactivated to terminate the reaction. PCR was performed by the addition of the following to the diluted double stranded cDNA pool: 10× cDNA PCR reaction buffer, 10 μM dNTP mix, 10,LM GSP, 10 μM API primer (kit), 50×Advantage cDNA Polymerase Mix. Thermal Cycling conditions were 94° C. for 30 seconds, 5 cycles of 94° C. for 5 seconds, 72° C. for 4 minutes, 5 cycles of 94° C. for 5 seconds, 70° C. for 4 minutes, 23 cycles of 94° C. for 5 seconds, 68° C. for 4 minutes. After the first round of PCR was performed using the GSP to extend to the end of the adapter to create the adapter primer binding site, exponential amplification of the specific cDNA of interest was observed. Usually a second nested PCR is performed to confirm the specific cDNA. The RACE product was analyzed on an agarose gel and then excised and purified from the gel (GeneClean, BIO 101). The RACE product was then cloned into pCTNR (General Contractor DNA Cloning System, 5′-3′, Inc.) and the DNA sequence determined to verify that the clone is specific to the gene of interest.

[0178] XI. Mutation Analysis

[0179] Comparative genes were identified using the above procedures and the exons from each gene were subjected to mutation detection analysis. Comparative DNA sequencing was used to identify polymorphisms in HBM candidate genes from chromosome 11q12-13. DNA sequences for candidate genes were amplified from patient lymphoblastoid cell lines.

[0180] The inventors developed a method based on analysis of direct DNA sequencing of PCR products amplified from candidate regions to search for the causative polymorphism. The procedure consisted of three stages that used different subsets of HBM family to find segregating polymorphisms and a population panel to assess the frequency of the polymorphisms. The family resources result from a single founder leading to the assumption that all affected individuals will share the same causative polymorphism.

[0181] Candidate regions were first screened in a subset of the HBM family consisting of the proband, daughter, and her mother, father and brother. Monochromosomal reference sequences were produced concurrently and used for comparison. The mother and daughter carried the HBM polymorphism in this nuclear family, providing the ability to monitor polymorphism transmission. The net result is that two HBM chromosomes and six non-HBM chromosomes were screened. This allowed exclusion of numerous frequent alleles. Only alleles exclusively present in the affected individuals passed to the next level of analysis.

[0182] Polymorphisms that segregated exclusively with the HBM phenotype in this original family were then re-examined in an extended portion of the HBM pedigree consisting of two additional nuclear families. These families consisted of five HBM and three unaffected individuals. The HBM individuals in this group included the two critical crossover individuals, providing the centromeric and telomeric boundaries of the critical region. Tracking the heredity of polymorphisms between these individuals and their affected parents allowed for further refining of the critical region. This group brought the total of HBM chromosomes screened to seven and the total of non-HBM chromosomes to seventeen.

[0183] When a given polymorphism continued to segregate exclusively with the HBM phenotype in the extended group, a population panel was then examined. This panel of 84 persons consisted of 42 individuals known to have normal bone mineral density and 42 individuals known to be unrelated but with untyped bone mineral density. Normal bone mineral density is within two standard deviations of BMD Z score 0. The second group was from the widely used CEPH panel of individuals. Any segregating polymorphisms found to be rare in this population were subsequently examined on the entire HBM pedigree and a larger population.

[0184] Polymerase chain reaction (PCR) was used to generate sequencing templates from the HBM family's DNA and monochromosomal controls. Enzymatic amplification of genes within the HBM region on 11q12-13 was accomplished using the PCR with oligonucleotides flanking each exon as well as the putative 5′ regulatory elements of each gene. The primers were chosen to amplify each exon as well as 15 or more base pairs within each intron on either side of the splice. All PCR primers were made as chimeras to facilitate dye primer sequencing. The M13-21F (5′-GTA A CGA CGG CCA GT-3′) (SEQ ID NO:30) and −28REV (5′-AAC AGC TAT GAC CAT G-3′) (SEQ ID NO:31) primer binding sites were built on to the 5′ end of each forward and reverse PCR primer, respectively, during synthesis. 150 ng of genomic DNA was used in a 50 μl PCR with 2 U AmpliTaq, 500 nM primer and 125 nM dNTP; Buffer and cycling conditions-were specific to each primer set. TaqStart antibody (Clontech) was used for hot start PCR to minimize primer dimer formation. 10% of the product was examined on an agarose gel. The appropriate samples were diluted 1:25 with deionized water before sequencing.

[0185] Each PCR product was sequenced according to the standard Energy Transfer primer (Amersham) protocol. All reactions took place in 96 well trays. 4 separate reactions, one each for A, C, G and T were performed for each template. Each reaction included 2 μl of the sequencing reaction mix and 3 μl of diluted template. The plates were then heat sealed with foil tape and placed in a thermal cycler and cycled according to the manufacturer's recommendation. After cycling, the 4 reactions were pooled. 3 μl of the pooled product was transferred to a new 96 well plate and 1 μl of the manufacturer's loading dye was added to each well. All 96 well pipetting procedures occurred on a Hydra 96 pipetting station (Robbins Scientific, USA). 1 μl of pooled material was directly loaded onto a 48 lane gel running on an ABI 377 DNA sequencer for a 10 hour, 2.4 kV run.

[0186] Polyphred (University of Washington) was used to assemble sequence sets for viewing with Consed (University of Washington). Sequences were assembled in groups representing all relevant family members and controls for a specified target region. This was done separately for each of the three stages. Forward and reverse reads were included for each individual along with reads from the monochromosomal templates and a color annotated reference sequence. Polyphred indicated potential polymorphic sites with a purple flag. Two readers independently viewed each assembly and assessed the validity of the purple-flagged sites.

[0187] A total of 23 exons present in the mature mRNA and several other portions of the primary transcript were evaluated for heterozygosity in the nuclear family of two HBM-affected and two unaffected individuals. 25 SNPs were identified, as shown in the table below.

TABLE 4
Single Nucleotide Polymorphisms in the Zmax1 Gene and Environs

| Exon Name | Location | Base Change |
|---|---|---|
| b200e21-h_Contig1_1.nt | 69169 (309G) | C/A |
| b200e21-h_Contig4_12.nt | 27402 (309G) | A/G |
| b200e21-h_Contig4_13.nt | 27841 (309G) | T/C |
| b200e21-h_Contig4_16.nt | 35600 (309G) | A/G |
| b200e21-h_Contig4_21.nt | 45619 (309G) | G/A |
| b200e21-h_Contig4_22.nt-a | 46018 (309G) | T/G |
| b200e21-h_Contig4_22.nt-b | 46093 (309G) | T/G |
| b200e21-h_Contig4_22.nt-c | 46190 (309G) | A/G |
| b200e21-h_Contig4_24.nt-a | 50993 (309G) | T/C |
| b200e21-h_Contig4_24.nt-b | 51124 (309G) | C/T |
| b200e21-h_Contig4_25.nt | 55461 (309G) | C/T |
| b200e21-h_Contig4_33.nt-a | 63645 (309G) | C/A |
| b200e21-h_Contig4_33.nt-b | 63646 (309G) | A/C |
| b200e21-h_Contig4_61.nt | 24809 (309G) | T/G |
| b200e21-h_Contig4_62.nt | 27837 (309G) | T/C |
| b200e21-h_Contig4_63.nt-a | 31485 (309G) | C/T |
| b200e21-h_Contig4_63.nt-b | 31683 (309G) | A/G |
| b200e21-h_Contig4_9.nt | 24808 (309G) | T/G |
| b527d12-h_Contig030g_1.nt-a | 31340 (308G) | T/C |
| b527d12-h_Contig030g_1.nt-b | 32538 (308G) | A/G |
| b527d12-h_Contig080C_2.nt | 13224 (308G) | A/G |
| b527d12-h_Contig087C_1.nt | 21119 (308G) | C/A |
| b527d12-h_Contig087C_4.nt | 30497 (308G) | G/A |
| b527d12-h_Contig088C_4.nt | 24811 (309G) | A/C |
| b527d12-h_Contig089_1HP.nt | 68280 (309G) | G/A |

[0188] In addition to the polymorphisms presented in Table 4, two additional polymorphisms can also be present in SEQ ID NO:2. These is a change at position 2002 of SEQ ID NO:2. Either a guanine or an adenine can appear at this position. This polymorphism is silent and is not associated with any change in the amino acid sequence. The second change is at position 4059 of SEQ ID NO:2 corresponding in a cytosine (C) to thymine (T) change. This polymorphism results in a corresponding amino acid change from a valine (to an alanine (A). Other polymorphisms were found in the candidate gene exons and adjacent intron sequences. Any one or combination of the polymorphisms listed in Table 4 or the two discussed above could also have a minor effect on bone mass when present in SEQ ID NO:2.

[0189] The present invention encompasses the nucleic acid sequences having the nucleic acid sequence of SEQ ID NO: 1 with the above-identified point mutations.

[0190] Preferably, the present invention encompasses the nucleic acid of SEQ ID NO: 2. Specifically, a base-pair substitution changing G to T at position 582 in the coding sequence of Zmax1 (the HBM gene) was identified as heterozygous in all HBM individuals, and not found in the unaffected individuals (i.e., b527d12-h_Contig087C_{—}1.nt). FIG. 5 shows the order of the contigs in B527D12. The direction of transcription for the HBM gene is from left to right. The sequence of contig308G of B527D12 is the reverse complement of the coding region to the HBM gene. Therefore, the relative polymorphism in contig 308G shown in Table 4 as a base change substitution of C to A is the complement to the G to T substitution in the HBM gene. This mutation causes a substitution of glycine 171 with valine (G171V).

[0191] The HBM polymorphism was confirmed by examining the DNA sequence of different groups of individuals. In all members of the HBM pedigree (38 individuals), the HBM polymorphism was observed in the heterozygous form in affected (i.e., elevated bone mass) individuals only (N=18). In unaffected relatives (N=20) (BMDZ<2.0) the HBM polymorphism was never observed. To determine whether this polymorphism was ever observed in individuals outside of the HBM pedigree, 297 phenotyped individuals were characterized at the site of the HBM gene. None were heterozygous at the site of the HBM polymorphism. In an unphenotyped control group, none of 64 individuals were observed to be heterozygous at position 582. Taken together, these data prove that the polymorphism observed in the kindred displaying the high bone mass phenotype is strongly correlated with the G→T polymorphism at position 582 of Zmax1. Furthermore, these results coupled with the ASO results described below, establish that the HBM polymorphism genetically segregates with the HBM phenotype, and that both the HBM polymorphism and phenotype are rare in the general population.

[0192] XII. Allele Specific Oligonucleotide (ASO) Analysis

[0193] The amplicon containing the HBM1 polymorphism was PCR amplified using primers specific for the exon of interest. The appropriate population of individuals was PCR amplified in 96 well microtiter plates as follows. PCR reactions (20 μl) containing 1× Promega PCR buffer (Cat. # M1883 containing 1.5 MM MgCl₂), 100 mM dNTP, 200 nM PCR primers (1863F: CCAAGTTCTGAGAAGTCC and 1864R: AATACCTGAAACCATACCTG), 1 U Amplitaq, and 20 ng of genomic DNA were prepared and amplified under the following PCR conditions: 94° C., 1 minute, (94° C., 30 sec.; 58° C., 30 sec.; 72° C., 1 min.) X35 cycles), 72° C., 5′, 4° C., hold. Loading dye was then added and 10 μl of the products was electrophoresed on 1.5% agarose gels containing 1 μg/ml ethidium bromide at 100-150 V for 5-10 minutes. Gels were treated 20 minutes in denaturing solution (1.5 M NaCl, 0.5 N NaOH), and rinsed briefly with water. Gels were then neutralized in 1 M Tris-HCl, pH 7.5, 1.5 M NaCl, for 20 minutes and rinsed with water. Gels were soaked in 10×SSC for 20 minutes and blotted onto nylon transfer membrane (Hybond N+-Amersham) in 10×SSC overnight. Filters were the rinsed in 6×SSC for 10 minutes and UV crosslinked.

[0194] The allele specific oligonucleotides (ASO) were designed with the polymorphism approximately in the middle. Oligonucleotides were phosphate free at the 5′end and were purchased from Gibco BRL. Sequences of the oligonucleotides are:

| | |
|---|---|
| 2326 Zmax1.ASO.g: | AGACTGGGGTGAGACGC |
| 2327 Zmax1.ASO.t: | CAGACTGGGTTGAGACGCC |

[0195] The polymorphic nucleotides are underlined. To label the oligos, 1.5 ill of 1 μg/μl ASO oligo (2326.Zmax1.ASO.g or 2327.Zmax1.ASO.t), 11 μL ddH₂O, 2 μl 10× kinase forward buffer, 5 μl γ³²p-ATp (6000 Ci/mMole), and 1 pi T4 polynucleotide kinase (10 U/μl) were mixed, and the reaction incubated at 37° C. for 30-60 minutes. Reactions were then placed at 95° C. for 2 minutes and 30 ml H₂O was added. The probes were purified using a G25 microspin column (Pharmacia).

[0196] Blots were prehybridized in 10 ml 5×SSPE, 5× Denhardt's, 2% SDS, and 100 pug/ml, denatured, sonicated salmon sperm DNA at 40° C. for 2 hr. The entire reaction mix of kinased oligo was then added to 10 ml fresh hybridization buffer (5×SSPE, 5× Denhardt's, 2% SDS) and hybridized at 40° C. for at least 4 hours to overnight.

[0197] All washes done in 5×SSPE, 0.1% SDS. The first wash was at 45° C. for 15 minutes; the solution was then changed and the filters washed 50° C. for 15 minutes. Filters were then exposed to Kodak biomax film with 2 intensifying screens at −70° C. for 15 minutes to 1 hr. If necessary the filters were washed at 55° C. for 15 minutes and exposed to film again. Filters were stripped by washing in boiling 0.1×SSC, 0.10% SDS for 10 minutes at least 3 times.

[0198] The two films that best captured the allele specific assay with the 2 ASOs were converted into digital images by scanning them into Adobe PhotoShop. These images were overlaid against each other in Graphic Converter and then scored and stored in FileMaker Pro 4.0 (see FIG. 9).

[0199] In order to determine the HBM1 allele frequency in ethnically diverse populations, 672 random individuals from various ethnic groups were typed by the allele specific oligonucleotide (ASO) method. This population included 96 CEPH grandparents (primarily Caucasian), 192 Caucasian, 192 African-American, 96 Hispanic, and 96 Asian individuals. No evidence was obtained for the presence of the HBM1 polymorphism in any of these individuals. Overall, a total of 911 individuals were typed either by direct sequencing or ASO hybridization; all were homozygous GG at the site of the HBM polymorphism (FIG. 14). This information illustrates that the HBM1 allele is rare in various ethnic populations.

[0200] Thus this invention provides a rapid method of identifying individuals with the HBM1 allele. This method could be used in the area of diagnostics and screening of an individual for susceptibility to osteoporosis or other bone disorder. The assay could also be used to identify additional individuals with the HBM1 allele or the additional polymorphisms described herein.

[0201] XIII. Cellular Localization of Zmax1

[0202] A. Gene Expression in Rat Tibia by non Isotopic In Situ Hybridization

[0203] In situ hybridization was conducted by Pathology Associates International (PAI), Frederick, Md. This study was undertaken to determine the specific cell types that express the Zmax1 gene in rat bone with particular emphasis on areas of bone growth and remodeling. Zmax1 probes used in this study were generated from both human (HuZmax1) and mouse (MsZmax1) cDNAs, which share an 87% sequence identity. The homology of human and mouse Zmax1 with rat Zmax1 is unknown.

[0204] For example, gene expression by non-isotopic in situ hybridization was performed as follows, but other methods would be known to the skilled artisan. Tibias were collected from two 6 to 8 week old female Sprague Dawley rats euthanized by carbon dioxide asphyxiation. Distal ends were removed and proximal tibias were snap frozen in OCT embedding medium with liquid nitrogen immediately following death. Tissues were stored in a −80° C. freezer.

[0205] Probes for amplifying PCR products from cDNA were prepared as follows. The primers to amplify PCR products from a cDNA clone were chosen using published sequences of both human LRP5 (Genbank Accession No. ABO17498) and mouse LRP5 (Genbank Accession No. AFO64984). In order to minimize cross reactivity with other genes in the LDL receptor family, the PCR products were derived from an intracellular portion of the protein coding region. PCR was performed in a 50 μI reaction volume using cDNA clone as template. PCR reactions contained 1.5 mM MgCl₂, 1 unit Amplitaq, 200 μM dNTPs and 2 μM each primer. PCR cycling conditions were 94° C. for 1 min., followed by 35 cycles of 94° C. for 30 seconds, 55° C. for 30 seconds, 72° C. for 30 seconds; followed by a 5 minute extension at 72° C. The reactions were then run on a 1.5% agarose Tris-Acetate gel. DNA was eluted from the agarose, ethanol precipitated and resuspended in 10 mM Tris, pH 8.0. Gel purified PCR products were prepared for both mouse and human cDNAs and supplied to Pathology Associates International for in situ hybridizations.

[0206] The sequence of the human and mouse PCR primers and products were as follows:

Human Zmax1 sense primer (HBM1253)
CCCGTGTGCTCCGCCGCCCAGTTC
Human Zmax1 antisense primer (HBM1465)
GGCTCACGGAGCTCATCATGGACTT
Human Zmax1 PCR product
CCCGTGTGCTCCGCCGCCCAGTTCCCCTGCGCGCGGGGTCAGTGTGTGGA
CCTGCGCCTGCGCTGCGACGGCGAGGCAGACTGTCAGGACCGCTCAGACG
AGGTGGACTGTGACGCCATCTGCCTGCCCAACCAGTTCCGGTGTGCGAGC
GGCCAGTGTGTCCTCATCAAACAGCAGTGCGACTCCTTCCCCGACTGTAT
CGACGGCTCCGACGAGCTCATGTGTGAAATCACCAAGCCGCCCTCAGACG
ACAGCCCGGCCCACAGCAGTGCCATCGGGCCCGTCATTGGCATCATCCTC
TCTCTCTTCGTCATGGGTGGTGTCTATTTTGTGTGCCAGCGCGTGGTGTG
CCAGCGCTATGCGGGGGCCAACGGGCCCTTCCCGCACGAGTATGTCAGCG
GGACCCCGCACGTGCCCCTCAATTTCATAGCCCCGGGCGGTTCCCAGCAT
GGCCCCTTCACAGGCATCGCATGCGGAAAGTCCATGATGAGCTCCGTGAG
CC
Mouse Zmax1 Sense primer (HBM1655)
AGCGAGGCCACCATCCACAGG
Mouse Zmax1 antisense primer (HBM1656)
TCGCTGGTCGGCATAATCAAT
Mouse Zmax1 PCR product
AGCAGAGCCACCATCCACAGGATCTCCCTGGAGACTAACAACAACGATGT
GGCTATCCCACTCACGGGTGTCAAAGAGGCCTCTGCACTGGACTTTGATG
TGTCCAACAATCACATCTACTGGACTGATGTTAGCCTCAAGACGATCAGC
CGAGCCTTCATGAATGGGAGCTCAGTGGAGCACGTGATTGAGTTTGGCCT
CGACTACCCTGAAGGAATGGCTGTGGACTGGATGGGCAAGAACCTCTATT
GGGCGGACACAGGGACCAACAGGATTGAGGTGGCCCGGCTGGATGGGCAG
TTCCGGCAGGTGCTTGTGTGGAGAGACCTTGACAACCCCAGGTCTCTGGC
TCTGGATCCTACTAAAGGCTACATCTACTGGACTGAGTGGGGTGGCAAGC
CAAGGATTGTGCGGGCCTTCATGGATGGGACCAATTGTATGACACTGGTA
GACAAGGTGGGCCGGGCCAACGACCTCACCATTGATTATGCCGACCAGCG
A

[0207] Riboprobes were synthesized as follows. The PCR products were reamplified with chimeric primers designed to incorporate either a T3 promoter upstream, or a T7 promoter downstream of the reamplification products. The resulting PCR products were used as template to synthesize digoxigenin-labeled riboprobes by in vitro transcription (IVT). Antisense and sense riboprobes were synthesized using T7 and T3 RNA polymerases, respectively, in the presence of digoxigenin-1 I-UTP (Boehringer-Mannheim) using a MAXIscript IVT kit (Ambion) according to the manufacturer. The DNA was then degraded with Dnase-1, and unincorporated digoxigenin was removed by ultrafiltration. Riboprobe integrity was assessed by electrophoresis through a denaturing polyacrylamide gel. Molecular size was compared with the electrophoretic mobility of a 100-1000 base pair (bp) RNA ladder (Ambion). Probe yield and labeling was evaluated by blot immunochemistry. Riboprobes were stored in 5 μl aliquots at −80° C.

[0208] The in situ hybridization was performed as follows. Frozen rat bone was cut into 5 μM sections on a Jung CM3000 cryostat (Leica) and mounted on adhesive slides (Instrumedics). Sections were kept in the cryostat at −20° C. until all the slides were prepared in order to prevent mRNA degradation prior to post-fixation for 15 minutes in 4% paraformaldehyde. Following post-fixation, sections were incubated with 1 ng/μl of either antisense or sense riboprobe in Pathology Associates International (PAI) customized hybridization buffer for approximately 40 hours at 58° C. Following hybridization, slides were subjected to a series of post-hybridization stringency washes to reduce nonspecific probe binding. Hybridization was visualized by immunohistochemistry with an anti-digoxigenin antibody (FAB fragment) conjugated to alkaline phosphatase. Nitroblue tetrazolium chloride/bromochloroindolyl phosphate (Boehringer-Mannheim), a precipitating alkaline phosphatase substrate, was used as the chromogen to stain hybridizing cells purple to nearly black, depending on the degree of staining. Tissue sections were counter-stained with nuclear fast red. Assay controls included omission of the probe, omission of probe and anti-digoxigenin antibody.

[0209] Specific cell types were assessed for demonstration of hybridization with antisense probes by visualizing a purple to black cytoplasmic and/or peri-nuclear staining indicating a positive hybridization signal for mRNA. Each cell type was compared to the replicate sections, which were hybridized with the respective sense probe. Results were considered positive if staining was observed with the antisense probe and no staining or weak background with the sense probe.

[0210] The cellular localization of the hybridization signal for each of the study probes is summarized in Table 5. Hybridization for Zmax1 was primarily detected in areas of bone involved in remodeling, including the endosteum and trabecular bone within the metaphysis. Hybridization in selected bone lining cells of the periosteum and epiphysis were also observed. Positive signal was also noted in chondrocytes within the growth plate, particularly in the proliferating chondrocytes. See FIGS. 10, 11 and 12 for representative photormicrographs of in situ hybridization results.

TABLE 5
Summary of Zmax1 in situ hybridization in rat tibia

| PROBE | SITE | ISH SIGNAL |
|---|---|---|
| Hu Zmax1 | Epiphysis | |
| | Osteoblasts | + |
| | Osteoclasts | − |
| | Growth Plate | |
| | resting chondrocytes | − |
| | proliferating chondrocytes | + |
| | hypertrophic chondrocytes | − |
| | Metaphysis | |
| | osteoblasts | + |
| | osteoclasts | + |
| | Diaphysis | − |
| | Endosteum | |
| | osteoblasts | + |
| | osteoclasts | + |
| | Periosteum | − |
| MsZmax1 | Epiphysis | |
| | Osteoblasts | + |
| | Osteoclasts | − |
| | Growth Plate | |
| | resting chondrocytes | − |
| | proliferating chondrocytes | + |
| | hypertrophic chondrocytes | + |
| | Metaphysis | |
| | osteoblasts | + |
| | osteoclasts | + |
| | Diaphysis | − |
| | Endosteum | |
| | osteoblasts | + |
| | osteoclasts | + |
| | Periosteum | + |

Legend: “+” = hybridization signal detected “−” = no hybridization signal detected
“ISH” - In situ hybridization

[0211] These studies confirm the positional expression of Zmax1 in cells involved in bone remodeling and bone formation. Zmax1 expression in the zone of proliferation and in the osteoblasts and osteoclasts of the proximal metaphysis, suggests that the Zmax1 gene is involved in the process of bone growth and mineralization. The activity and differentiation of osteoblasts and osteoclasts are closely coordinated during development as bone is formed and during growth as well as in adult life as bone undergoes continuous remodeling. The formation of internal bone structures and bone remodeling result from the coupling of bone resorption by activated osteoclasts with subsequent deposition of new material by osteoblasts. Zmax1 is related to the LDL receptor gene, and thus may be a receptor involved in mechanosensation and subsequent signaling in the process of bone remodeling. Therefore, changes in the level of expression of this gene could impact on the rate of remodeling and degree of mineralization of bone.

[0212] XIV. Antisense

[0213] Antisense oligonucleotides are short synthetic nucleic acids that contain complementary base sequences to a targeted RNA. Hybridization of the RNA in living cells with the antisense oligonucleotide interferes with RNA function and ultimately blocks protein expression. Therefore, any gene for which the partial sequence is known can be targeted by an antisense oligonucleotide.

[0214] Antisense technology is becoming a widely used research tool and will play an increasingly important role in the validation and elucidation of therapeutic targets identified by genomic sequencing efforts.

[0215] Antisense technology was developed to inhibit gene expression by utilizing an oligonucleotide complementary to the mRNA that encodes the target gene. There are several possible mechanisms for the inhibitory effects of antisense oligonucleotides. Among them, degradation of mRNA by RNase H is considered to be the major mechanism of inhibition of protein function. This technique was originally used to elucidate the function of a target gene, but may also have therapeutic applications, provided it is designed carefully and properly.

[0216] An example of materials and methods for preparing antisense oligonucleotides can be performed as follows. Preliminary studies have been undertaken in collaboration with Sequiter (Natick, Mass.) using the antisense technology in the osteoblast-like murine cell line, MC3T3. These cells can be triggered to develop along the bone differentiation sequence. An initial proliferation period is characterized by minimal expression of differentiation markers and initial synthesis of collagenous extracellular matrix. Collagen matrix synthesis is required for subsequent induction of differentiation markers. Once the matrix synthesis begins, osteoblast marker genes are activated in a clear temporal sequence: alkaline phosphatase is induced at early times while bone sialoprotien and osteocalcin appear later in the differentiation process. This temporal sequence of gene expression is useful in monitoring the maturation and mineralization process. Matrix mineralization, which does not begin until several days after maturation has started, involves deposition of mineral on and within collagen fibrils deep within the matrix near the cell layer-culture plate interface. The collagen fibril-associated mineral formed by cultured osteoblasts resembles that found in woven bone in vivo and therefore is used frequently as a study reagent.

[0217] MC3T3 cells were transfected with antisense oligonucleotides for the first week of the differentiation, according to the manufacturer's specifications (U.S. Pat. No. 5,849,902).

[0218] The oligonucleotides designed for Zmax1 are given below:

| | |
|---|---|
| 10875: | AGUACAGCUUCUUGCCAACCCAGUC |
| 10876: | UCCUCCAGGUCGAUGGUCAGCCCAU |
| 10877: | GUCUGAGUCCGAGUUCAAAUCCAGG |

[0219] FIG. 13 shows the results of antisense inhibition of Zmax1 in MC3T3 cells. The three oligonucleotides shown above were transfected into MC3T3 and RNA was isolated according to standard procedures. Northern analysis clearly shows markedly lower steady state levels of the Zmax1 transcript while the control gene GAPDH remained unchanged. Thus, antisense technology using the primers described above allows for the study of the role of Zmax1 expression on bone biology.

[0220] XV. Yeast Two Hybrid

[0221] In order to identify the signaling pathway that Zmax1 participates in to modulate bone density, the yeast two hybrid protein interaction technology was utilized. This technique facilitates the identification of proteins that interact with one another by coupling tester proteins to components of a yeast transcription system (Fields and Song, 1989, Nature 340: 245-246; U.S. Pat. No. 5,283,173 by Fields and Song; Johnston, 1987, Microbiol. Rev. 51: 458-476; Keegan et al, 1986, Science 231: 699-704; Durfee et al, 1993, Genes Dev. 7: 555-569; Chien et al, 1991, Proc. Natl. Acad. Sci USA 88: 9578-9582; Fields et al., 1994, Trends in Genetics 10: 286-292; and Gyuris et al., 1993, Cell 75: 791-803). First a “bait” protein, the protein for which one seeks interacting proteins, is fused to the DNA binding domain of a yeast transcription factor. Second, a cDNA library is constructed that contains cDNAs fused to the transcriptional activation domain of the same yeast transcription factor; this is termed the prey library. The bait construct and prey library are transformed into yeast cells and then mated to produce diploid cells. If the bait interacts with a specific prey from the cDNA library, the activation domain is brought into the vicinity of the promoter via this interaction. Transcription is then driven through selectable marker genes and growth on selective media indicates the presence of interacting proteins.

[0222] The amino acid sequence used in the yeast two hybrid experiments discussed herein consisted of the entire cytoplasmic domain and a portion of the transmembrane domain and is shown below (amino to carboxy orientation):

RVVCQRYAGA NGPFPHEYVS GTPHVPLNFI APGGSQHGPF TGIACGKSMM
SSVSLMGGRG GVPLYDRNHV TGASSSSSSS TKATLYPPIL NPPPSPATDP
SLYNMDMFYS SNIPATVRPY RPYIIRGMAP PTTPCSTDVC DSDYSASRWK
ASKYYLDLNS DSDPYPPPPT PHSQYLSAED SCPPSPATER SYFHLFPPPP
SPCTDSS

[0223] The last 6 amino acids of the putative transmembrane domain are indicated in bold. Putative SH3 domains are underlined. Additional amino acid sequences of 50 amino acids or greater in either the proteins encoded by the Zmax1 or HBM alleles can also be used as bait. The upper size of the polypeptide used as bait is limited only by the presence of a complete transmembrane domain (see FIG. 4), which will render the bait to be nonfunctional in a yeast two hybrid system. These additional bait proteins can be used to identify additional proteins which interact with the proteins encoded by HBM or Zmax1 in the focal adhesion signaling pathway or in other pathways in which these HBM or Zmax1 proteins may act. Once identified, methods of identifying agents which regulate the proteins in the focal adhesion signaling pathway or other pathways in which HBM acts can be performed as described herein for the HBM and Zmax1 proteins.

[0224] In order to identify cytoplasmic Zmax1 signaling pathways, the cytoplasmic domain of Zmax1 was subcloned into two bait vectors. The first vector was pDBleu, which was used to screen a brain, and Hela prey cDNA library cloned into the vector pPC86 (Clontech). The second bait vector used was pDBtrp, which was used to screen a cDNA prey library derived from the TE85 osteosarcoma cell line in vector pOP46. Standard techniques known to those skilled in the art were used as described in Fields and Song, 1989, Nature 340: 245-246; U.S. Pat. No. 5,283,173 by Fields and Song; Johnston, 1987, Microbiol. Rev. 51: 458-476; Keegan et al., 1986, Science 231: 699-704; Durfee et al., 1993, Genes Dev. 7: 555-569; Chien et al., 1991, Proc. Natl. Acad. Sci USA 88: 9578-9582; Fields et al., 1994, Trends in Genetics 10: 286-292; and Gyuris et al., 1993, Cell 75: 791-803. The bait construct and prey cDNA libraries were transformed into yeast using standard procedures.

[0225] To perform the protein interaction screen, an overnight culture of the bait yeast strain was grown in 20 ml SD selective medium with 2% glucose (pDBLeu, SD-Leu medium, pDBtrp, SD-trp medium). The cultures were shaken vigorously at 30° C. overnight. The cultures were diluted 1: 10 with complete medium (YEPD with 2% glucose) and the cultures then incubated with shaking for 2 hrs at 30° C.

[0226] The frozen prey library was thawed, and the yeast cells reactivated by growing them in 150 ml YEPD medium with 2% glucose for 2 hrs at 30° C. A filter unit was sterilized with 70% ethanol and washed with sterile water to remove the ethanol. The cell densities of both bait and prey cultures were measured by determining the OD at 600 um. An appropriate volume of yeast cells that corresponded to a cell number of 1 ml of OD 600=4 of each yeast strain, bait and prey (library) was placed in a 50 ml Falcon tube. The mixture was then filtered through the sterilized filter unit. The filter was then transferred onto a prewarmed YEPD agar plate with the cell side up, removing all air bubbles underneath the filter. Plates were then incubated at 30° C. for 6 hrs. One filter was transferred into a 50 ml Falcon tube, and 10 ml of SD with 2% Glucose was added; cells were resuspended by vortexing for 10 sec.

[0227] The number of primary diploid cells (growth on SD-Leu, -Trp plates) versus the numbers of colony forming units growing on SD-Trp and SD-Leu plates only was then titered. Different dilutions were plated and incubated at 30° C. for two days. The number of colony forming units was then counted. The number of diploid colonies (colonies on SD-Leu-Trp plates) permits the calculation of whether or not the whole library of prey constructs was mated to the yeast expressing the bait. This information is important to judge the quality of the screen.

[0228] A. Indirect Selection

[0229] Resuspended cells from 5 filtermatings were then pooled and the cells sedimented by centrifugation in a 50 ml Falcon tube. Cells were then resuspended in 16 ml SD medium with 2% Glc. Two ml of this cell suspension was plated onto 8 square plates each (SD-Leu, -Trp) with sterile glass beads and selected for diploid cells by incubating at 30° C. for 18-20 hrs.

[0230] Cells were then scraped off the square plates, the cells centrifuged and combined into one 50 ml Falcon tube. The cell pellet was then resuspended in 25 ml of SD medium with 2% glucose. The cell number was then determined by counting of an appropriate dilution (usually 1:100 to 1:1000) with a Neugebauer chamber. Approximately 5×10⁷ diploid cells were plated onto the selective medium. The observations about the growth of the bait strain together with irrelevant prey vectors helps to determine which selective plates will have to be chosen for the library screen. Generally, all screens were plated on one square plate each with SD-Leu, -Trp, -His; SD-Leu, -Trp, His, 5 mM 3AT, and SD-Leu, -Trp, -His, -Ade is recommended.

[0231] The yeast cells were then spread homogeneously with sterile glass beads and incubated at 30° C. for 4 days. The number of colony forming yeast cells was titered by plating different dilutions of the scraped cell suspension onto SD-Leu, -Trp plates. Usually, plating of 100 μl of a 10⁻³ and 10⁻⁴ dilution gave 100-1000 colonies per plate.

[0232] B. Direct Selection

[0233] Five filters with the mated yeast cells were each transferred into separate 50 ml Falcon tubes and the cells resuspended with 10 ml SD medium with 2% Glc, each, followed by vortexing for 10 sec. The resuspended cells were combined and centrifuged in a Beckman centrifuge at 3000 rpm. The supernatant was discarded and the cells resuspended in 6 ml of SD medium with 2% Glc. Two ml of the suspension was spread onto each selective square plate and incubated at 30° C. for 4-5 days.

[0234] C. Isolation of Single Colonies

[0235] Yeast cells from an isolated colony were picked with a sterile tooth pick and transferred into individual wells of a 96 well plate. The cells were resuspended in 50 μl of SD-Leu, -Trp, -His medium and incubated at 30° C. for one day. The yeast cells were then stamped onto a SD-Leu, -Trp, -His plate in 96 well format and incubated at 30° C. for 2 days. Yeast cells were also stamped onto a Nylon filter covering a YEPD plate and incubated at 30° C. for one day. The cells on the Nylon filter were used for the analysis of the β-Gal reporter activity.

[0236] Yeast colonies were scraped from the SD-Leu, -Trp, -His plate with a sterile tooth pick, and reconfigured, if necessary, according to the β-Gal activity and then resuspended in 20% glycerol. This served as a master plate for storage at −80° C.

[0237] For DNA preparation, yeast cells from the glycerol stock were stamped onto a SD-Trp plate and incubated at 30° C. for 2 days. After two days of incubation, the yeast colonies were ready for colony PCR and sequencing. Standard colony PCR conditions were used to amplify inserts from preys recovered from the interaction screen. Sequencing was done using standard sequencing reactions and ABI377 (Perkin Elmer) fluorescent sequencing machines.

[0238] D. Verification of Bait/Prey Interaction

[0239] Glycerol stocks of the prey of interest were thawed and inoculated in a 10 ml overnight culture of SD with glucose-Trp. After overnight growth, plasmid DNA preparation was performed using the BIO 101 RPM Yeast Plasmid Isolation Kit with 10 ml of culture. The culture was centrifuged and transfered to a 1.5 ml microcentrifuge tube. Yeast Lysis Matrix was then added to the pellet followed by 250 μl of Alkaline Lysis Solution. Samples were then vortexed for 5 minutes. 250 μl Neutralizing Solution was added and the sample mixed briefly. Samples were centrifuiged for 2 minutes at room temperature in a microcentrifuge. The supernatant was transferred to a Spin Filter avoiding debris and Lysis Matrix. 250 μl of Glassmilk Spin Buffer was added, and the tubes inverted to mix. Samples were centrifuged for 1 min and the liquid in the Catch Tube was discarded. 500 μl of Wash Solution was added, the samples were centrifuged for 1 min, and the wash solution was discarded. The wash step was repeated once followed by a 1 min dry centrifugation to drive the remaining liquid out of the Spin Filter. The filter was transferred to a new Catch Tube and 100 μl of sterile H₂O was added; samples were then vortexed briefly to resuspend and centrifuged for 30 seconds to collect the DNA in the bottom of the Catch Tube.

[0240] Five μl of DNA was then transformed into DH10B Electromax cells using standard procedures and glycerol stocks prepared. Miniprep DNA was prepared using the Qiagen QIAprep Spin Miniprep Kit. DNA was finally eluted with 30 ill of Qiagen EB buffer. One μl of the plasmid DNA samples was then used to transform yeast cells using standard procedures. After 2 days of growth on SD-trp media, colonies were picked and patched onto fresh media. Similarly, bait colonies were patched onto SD-Leu media. Both were grown overnight at 30° C.

[0241] For mating, cells from bait and prey patches were spread together on YAPD media and incubated at 30° C. for 12 hr. This plate was then replicaplated onto an SD Agar-Leu-Trp plate and grown for 2 days at 30° C. To test the strength of interaction these plates were replicaplated onto SD Agar-Leu-Trp-His, SD Agar-Leu-Trp-His with 5 mM 3AT and 10 mM 3AT, SD Agar-Leu-Trp-His-Ade, and SD Agar-Leu-Trp-Ura media and grown for 2 days at 30° C.

[0242] E. Galacton Star β-Galactosidase Activity Assay

[0243] After streaking and replica plating positive interactors on selection plates, colonies were placed in a 96 well dish with 200 μl of SD-medium, leaving wells 1 and 96 blank. Ten microliters from the first 96 well dish was plated into another flat bottom 96 well dish containing 100 μl of SD-medium. Controls consisted of a negative control and a very weak positive control. The cell density was measured at OD₆₀₀ (a value of 1 corresponds to 1×10⁷ cells utilizing a 96 well spectrophotometer). The OD was usually between 0.03 and 0.10. Using microplates specifically for the luminometer, 50 μl of reaction mixture were pipetted into each well. Fifty microliters of culture were then added and mixed by pipetting up and down twice. The reaction was incubated for 30 minutes at room temperature followed by measurement of Relative Light Units using a luminometer.

[0244] Table 6 lists the genes identified in the yeast two hybrid screens from the 3 prey libraries tested. Two genes, zyxin and axin, were found to interact with the cytoplasmic domain of Zmax1 in all three screens. Three genes, alpha-actinin, TCB and S1-5 interacted in two of the three screens.

[0245] A variety of proteins found at sites of cell-cell and cell-matrix contact (focal contacts/adesion plaques) were shown to interact with the cytoplasmic domain of Zmax1. These include alpha-actinin, Trio, Pinch-like protein, and Zyxin. PINCH is a LIM domain-containing protein that is known to interact with integrin-linked kinase, an early signaler in integrin and growth factor signaling pathways. The finding of a closely related gene in the yeast two hybrid screen raises the possibility of a novel pathway linked to integrin signaling from extracellular matrix signals. Trio, also known to localize to focal adhesions, is thought to play a key role in coordinating cell-matrix interactions and cytoskeletal rearrangements involved in cell movement. Zyxin, another LIM domain-containing protein, is also localized to adhesion plaques and is thought to be involved in reorganization of the cytoskeleton when triggers are transmitted via integrin signaling pathways. Zyxin also interacts with alpha actinin, which we identified as interacting with Zmax1. Other LIM domain containing proteins identified include the human homologue of mouse ajuba, LIMD1, and a novel LIMD1-like protein.

[0246] Axin was also identified from the two hybrid experiments. This protein is involved in inhibition of the Wnt signaling pathway and interacts with the tumor suppressor APC. There is a link here with the focal adhesion signaling described above: one common step in the two pathways involves inhibition of glycogen synthase kinase 3, which in turn results in the activation of β-catenin/Lef-1 and AP-1 transcription factors. Axin/APC are involved in this as well as integrin linked kinase. The Wnt pathway has a role in determining cell fates during embryogenesis. If inappropriately activated, the Wnt pathway may also lead to cancer. The Wnt pathway also seems to have a role in cytoskeletal rearrangements. A model depicting Zmax1 involvement in focal adhesion signaling is depicted in FIG. 15.

[0247] This data coupled with other studies suggest that integrin signaling pathways have a role in cellular responses to mechanical stress and adhesion. This provides an attractive model for the mechanism of action of Zmax1 in bone biology. It is possible that Zmax1 is involved in sensing either mechanical stress directly or binding a molecule in the extracellular matrix that is related to mechanical sensation. Signaling through subsequent pathways may be involved in bone remodeling due to effects on cell morphology, cell adhesion, migration, proliferation, differentiation, and apoptosis in bone cells.

TABLE 6

Yeast Two Hybrid Results

| Gene | | Genbank | NT | AA |
|---|---|---|---|---|
| Symbol | Gene | Accession # | SEQ ID NO: | SEQ ID NO: |
| ACTN1 | alpha-actinin | NM_001102 | 63 | |
| AES | amino-terminal enhancer of | NM_001130.3 | 64 | |
| AIP4 | atrophin-1 interacting protein | AF038564.1 | 65 | |
| Novel | Ajuba | | 66 | |
| AXIN | Wnt signaling | AF009674.1 | 67 | |
| CDC23 | cell division cycle 23, yeast, | NM_004661.1 | 68 | |
| | homolog | | | |
| HSM800944 | Similar to TRIO | AL117435.1 | 69 | |
| HSM800936 | | AL117427.1 | 70 | |
| Novel | Similar to LIM domains | | 71 | |
| | containing protein 1 | | | |
| DEEPEST | mitotic spindle coiled-coil | NM_006461.1 | 72 | |
| | related protein | | | |
| ECM1 | extracellular matrix protein 1 | U65932.1 | 73 | |
| EF1A | elongation factor 1-alpha | X16869.1 | 74 | |
| FN | fibronectin | X02761.1 | 75 | |
| HOXB13 | homeodomain protein | U81599.1 | 76 | |
| Novel | Glu-Lys Rich protein | | 77 | |
| LIMD1 | LIM domains containing 1 | NM_014240.1 | 78 | |
| Novel | PINCH-like | | 79 | |
| RANBPM | centrosomal protein | NM_005493.1 | 80 | |
| S1-5 | extracellular protein | U03877.1 | 81 | |
| TCB | gene encoding cytosolic | M26252.1 | 82 | |
| | thyroid hormone-binding | | | |
| TID | tumorous imaginal discs | NM_005147.1 | 83 | |
| ZYX | Zysin | NM_003461.1 | 84 | |
| TRIO | GTPase | U42390.1 | 85 | |
| HUMPITPB | phosphatidylinositol transfer | D30037.1 | 86 | |
| | protein | | | |
| ACTN1 | alpha-actinin | NP_001093.1 | | 87 |
| AES | amino-terminal enhancer of | NP_001121.2 | | 88 |
| AIP4 | atrophin-1 interacting protein | AAC04845.1 | | 89 |
| Novel | Ajuba | | | 90 |
| AXIN | Wnt signalling | AAC51624.1 | | 91 |
| CDC23 | cell division cycle 23, yeast | NP_004652.1 | | 92 |
| | homolog | | | |
| Novel | Similar to TRIO CAB55923.1 | | | 93 |
| Novel | Similar to LIM domains | | | 94 |
| | containing protein 1 | | | |
| DEEPEST | mitotic spindle coiled-coil | NP_006452.1 | | 95 |
| | related protein | | | |
| ECM1 | extracellular matrix protein 1 | AAB05933.1 | | 96 |
| EF1A | elongation factor 1-alpha | CAA34756.1 | | 97 |
| FN | fibronectin | CAA26536.1 | | 98 |
| Novel | Glu-Lys rich protein | | | 99 |
| HOXB13 | homeodomain protein B13 | AAB39863.1 | | 100 |
| LIMD1 | LIM domains containing 1 | NP_055055.1 | | 101 |
| Novel | PINCH-like | | | 102 |
| RANBPM | centrosomal protein | NP_005484.1 | | 103 |
| S1-5 | extracellular protein | AAA65590.1 | | 104 |
| TCB | cytosolic thyroid hormone-binding | AAA36672.1 | | 105 |
| | binding protein | | | |
| TID | tumorous imaginal discs | NP_005138.1 | | 106 |
| ZYX | Zyxin | NP_003452.1 | | 107 |
| TRIO | GTPase | AAC34245.1 | | 108 |
| PTDINSTP | phosphatidylinositol transfer | P48739 | | 109 |
| | protein beta isoform | | | |

[0248] In light of the model depicted in FIG. 15 and the results shown in Table 6, another aspect contemplated by the invention would be to regulate bone density and bone mass disorders by the regulating focal adhesion signaling. The regulation can occur by regulating the DNA, mRNA transcript or protein encoded by any of the members involved in the focal adhesion signaling pathway as identified by the yeast two hybrid system.

[0249] Also contemplated are the novel nucleic acids and proteins identified by the HBM yeast two hybrid system. These include but are not limited to SEQ ID NO: 66 (Ajuba), SEQ ID NO: 71 (a gene similar to a gene encoding LIM domains containing protein 1), SEQ ID NO: 77 (Glu-Lys Rich protein), SEQ ID NO: 79 (PINCH-like gene), SEQ ID NO: 90 (Ajuba protein), SEQ ID NO: 93 (protein similar to TRIO), SEQ ID NO: 94 ( ), SEQ ID NO: 99 (Glu-Lys rich protein) and SEQ ID NO: 102 (PINCH-like protein).

[0250] XVI. Potential Function

[0251] The protein encoded by Zmax1 is related to the Low Density Lipoprotein receptor (LDL receptor). See, Goldstein et al, Ann. Rev. Cell Biology, 1: 1-39 (1985); Brown et al, Science, 232:34-47 (1986). The LDL receptor is responsible for uptake of low density lipoprotein, a lipid-protein aggregate that includes cholesterol. Individuals with a defect in the LDL receptor are deficient in cholesterol removal and tend to develop artherosclerosis. In addition, cells with a defective LDL receptor show increased production of cholesterol, in part because of altered feedback regulation of cholesterol synthetic enzymes and in part because of increased transcription of the genes for these enzymes. In some cell types, cholesterol is a precursor for the formation of steroid hormones.

[0252] Thus, the LDL receptor may, directly or indirectly, function as a signal transduction protein and may regulate gene expression. Because Zmax1 is related to the LDL receptor, this protein may also be involved in signaling between cells in a way that affects bone remodeling.

[0253] The glycine 171 amino acid is likely to be important for the function of Zmax1 because this amino acid is also found in the mouse homologue of Zmax1. The closely related LRP6 protein also contains glycine at the corresponding position (Brown et al, Biochemical and Biophysical Research Comm., 248:879-888 (1988)). Amino acids that are important in a protein's structure or function tend to be conserved between species, because natural selection prevents mutations with altered amino acids at important positions from arising.

[0254] In addition, the extracellular domain of Zmax1 contains four repeats consisting of five YWTD motifs followed by an EFG motif. This 5YWTD+EGF repeat is likely to form a distinct folded protein domain, as this repeat is also found in the LDL receptor and other LDL receptor-related proteins. The first three 5YWTD+EGF repeats are very similar in their structure, while the fourth is highly divergent. Glycine 171 occurs in the central YWTD motif of the first 5YWTD+EGF repeat in Zmax1. The other two similar 5YWTD+EGF repeats of Zmax1 also contain glycine at the corresponding position, as does the 5YWTD+EGF repeat in the LDL receptor protein. However, only 17.6% of the amino acids are identical among the first three 5YWTD+EGF repeats in Zmax1 and the single repeat in the LDL receptor. These observations indicate that glycine 171 is essential to the function of this repeat, and mutation of glycine 171 causes a functional alteration of Zmax1. The cDNA and peptide sequences are shown in FIGS. 6A-6E. The critical base at nucleotide position 582 is indicated in bold and is underlined.

[0255] Northern blot analysis (FIGS. 7A-B) reveals that Zmax1 is expressed in human bone tissue as well as numerous other tissues. A multiple-tissue Northern blot (Clontech, Palo Alto, Calif.) was probed with exons from Zmax1. As shown in FIG. 7A, the 5.5 kb Zmax1 transcript was highly expressed in heart, kidney, lung, liver and pancreas and is expressed at lower levels in skeletal muscle and brain. A second northern blot, shown in FIG. 7B, confirmed the transcript size at 5.5 kb, and indicated that Zmax1 is expressed in bone, bone marrow, calvaria and human osteoblastic cell lines.

[0256] Taken together, these results coupled with the yeast two hybrid results indicate that the HBM polymorphism in the Zmax1 gene is responsible for the HBM phenotype, and that the Zmax1 gene is important in bone development. In addition, because mutation of Zmax1 can alter bone mineralization and development, it is likely that molecules that bind to Zmax1 may usefully alter bone development. Such molecules may include, for example, small molecules, proteins, RNA aptamers, peptide aptamers, and the like.

[0257] XVII. Preparation of Nucleic Acids, Vectors, Transformations and Host Cells

[0258] Large amounts of the nucleic acids of the present invention may be produced by replication in a suitable host cell. Natural or synthetic nucleic acid fragments coding for a desired fragment will be incorporated into recombinant nucleic acid constructs, usually DNA constructs, capable of introduction into and replication in a prokaryotic or eukaryotic cell. Usually the nucleic acid constructs will be suitable for replication in a unicellular host, such as yeast or bacteria, but may also be intended for introduction to (with and without integration within the genome) cultured mammalian or plant or other eukaryotic cell lines. The purification of nucleic acids produced by the methods of the present invention is described, for example, in Sambrook et al, Molecular Cloning. A Laboratory Manual, 2nd Ed. (Cold Spring Harbor Laboratory, Cold Spring Harbor, N.Y. (1989) or Ausubel et al, Current Protocols in Molecular Biology, J. Wiley and Sons, NY (1992).

[0259] The nucleic acids of the present invention may also be produced by chemical synthesis, e.g., by the phosphoramidite method described by Beaucage et al, Tetra. Letts., 22:1859-1862 (1981) or the triester method according to Matteucci, et al, J. Am. Chem. Soc., 103:3185 (1981), and may be performed on commercial, automated oligonucleotide synthesizers. A double-stranded fragment may be obtained from the single-stranded product of chemical synthesis either by synthesizing the complementary strand and annealing the strands together under appropriate conditions or by adding the complementary strand using DNA polymerase with an appropriate primer sequence.

[0260] Nucleic acid constructs prepared for introduction into a prokaryotic or eukaryotic host may comprise a replication system recognized by the host, including the intended nucleic acid fragment encoding the desired protein, and will preferably also include transcription and translational initiation regulatory sequences operably linked to the protein encoding segment. Expression vectors may include, for example, an origin of replication or autonomously replicating sequence (ARS) and expression control sequences, a promoter, an enhancer and necessary processing information sites, such as ribosome-binding sites, RNA splice sites, polyadenylation sites, transcriptional terminator sequences, and mRNA stabilizing sequences. Secretion signals may also be included where appropriate, whether from a native HBM or Zmax1 protein or from other receptors or from secreted proteins of the same or related species, which allow the protein to cross and/or lodge in cell membranes, and thus attain its functional topology, or be secreted from the cell. Such vectors may be prepared by means of standard recombinant techniques well known in the art and discussed, for example, in Sambrook et al, Molecular Cloning. A Laboratory Manual, 2nd Ed. (Cold Spring Harbor Laboratory, Cold Spring Harbor, N.Y. (1989) or Ausubel et al, Current Protocols in Molecular Biology, J. Wiley and Sons, NY (1992).

[0261] An appropriate promoter and other necessary vector sequences will be selected so as to be functional in the host, and may include, when appropriate, those naturally associated with Zmax1 or HBM genes. Examples of workable combinations of cell lines and expression vectors are described in Sambrook et al, Molecular Cloning. A Laboratory Manual, 2nd Ed. (Cold Spring Harbor Laboratory, Cold Spring Harbor, N.Y. (1989) or Ausubel et al, Current Protocols in Molecular Biology, J. Wiley and Sons, NY (1992). Many useful vectors are known in the art and may be obtained from such vendors as Stratagene, New England BioLabs, Promega Biotech, and others. Promoters such as the trp, lac and phage promoters, tRNA promoters and glycolytic enzyme promoters may be used in prokaryotic hosts. Useful yeast promoters include promoter regions for metallothionein, 3-phosphoglycerate kinase or other glycolytic enzymes such as enolase or glyceraldehyde-3-phosphate dehydrogenase, enzymes responsible for maltose and galactose utilization, and others. Vectors and promoters suitable for use in yeast expression are further described in EP 73,675A. Appropriate non-native mammalian promoters might include the early and late promoters from SV40 (Fiers et al, Nature, 273:113 (1978)) or promoters derived from murine Moloney leukemia virus, mouse tumor virus, avian sarcoma viruses, adenovirus II, bovine papilloma virus or polyoma. In addition, the construct may be joined to an amplifiable gene (e.g., DHFR) so that multiple copies of the gene may be made. For appropriate enhancer and other expression control sequences, see also Enhancers and Eukaryotic Gene Expression, Cold Spring Harbor Press, Cold Spring Harbor, N.Y. (1983).

[0262] While such expression vectors may replicate autonomously, they may also replicate by being inserted into the genome of the host cell, by methods well known in the art.

[0263] Expression and cloning vectors will likely contain a selectable marker, a gene encoding a protein necessary for survival or growth of a host cell transformed with the vector. The presence of this gene ensures growth of only those host cells which express the inserts. Typical selection genes encode proteins that a) confer resistance to antibiotics or other toxic substances, e.g. ampicillin, neomycin, methotrexate, etc.; b) complement auxotrophic deficiencies, or c) supply critical nutrients not available from complex media, e.g., the gene encoding D-alanine racemase for Bacilli. The choice of the proper selectable marker will depend on the host cell, and appropriate markers for different hosts are well known in the art.

[0264] The vectors containing the nucleic acids of interest can be transcribed in vitro, and the resulting RNA introduced into the host cell by well-known methods, e.g., by injection (see, Kubo et al, FEBS Letts. 241:119 (1988)), or the vectors can be introduced directly into host cells by methods well known in the art, which vary depending on the type of cellular host, including electroporation; transfection employing calcium chloride, rubidium chloride, calcium phosphate, DEAE-dextran, or other substances; microprojectile bombardment; lipofection; infection (where the vector is an infectious agent, such as a retroviral genome); and other methods. See generally, Sambrook et al., 1989 and Ausubel et al., 1992. The introduction of the nucleic acids into the host cell by any method known in the art, including those described above, will be referred to herein as “transformation.” The cells into which have been introduced nucleic acids described above are meant to also include the progeny of such cells.

[0265] Large quantities of the nucleic acids and proteins of the present invention may be prepared by expressing the Zmax1 or HBM nucleic acids or portions thereof in vectors or other expression vehicles in compatible prokaryotic or eukaryotic host cells. The most commonly used prokaryotic hosts are strains of Escherichia coli, although other prokaryotes, such as Bacillus subtilis or Pseudomonas may also be used.

[0266] Mammalian or other eukaryotic host cells, such as those of yeast, filamentous fungi, plant, insect, or amphibian or avian species, may also be useful for production of the proteins of the present invention. Propagation of mammalian cells in culture is per se well known. See, Jakoby and Pastan (eds.), Cell Culture. Methods in Enzymology, volume 58, Academic Press, Inc., Harcourt Brace Jovanovich, NY, (1979)). Examples of commonly used mammalian host cell lines are VERO and HeLa cells, Chinese hamster ovary (CHO) cells, and W138, BHK, and COS cell lines, although it will be appreciated by the skilled practitioner that other cell lines may be appropriate, e.g., to provide higher expression desirable glycosylation patterns, or other features.

[0267] Clones are selected by using markers depending on the mode of the vector construction. The marker may be on the same or a different DNA molecule, preferably the same DNA molecule. In prokaryotic hosts, the transformant may be selected, e.g., by resistance to ampicillin, tetracycline or other antibiotics. Production of a particular product based on temperature sensitivity may also serve as an appropriate marker.

[0268] Prokaryotic or eukaryotic cells transformed with the nucleic acids of the present invention will be useful not only for the production of the nucleic acids and proteins of the present invention, but also, for example, in studying the characteristics of Zmax1 or HBM proteins.

[0269] Antisense nucleic acid sequences are useful in preventing or diminishing the expression of Zmax1 or HBM, as will be appreciated by one skilled in the art. For example, nucleic acid vectors containing all or a portion of the Zmax1 or HBM gene or other sequences from the Zmax1 or HBM region may be placed under the control of a promoter in an antisense orientation and introduced into a cell. Expression of such an antisense construct within a cell will interfere with Zmax1 or HBM transcription and/or translation and/or replication.

[0270] The probes and primers based on the Zmax1 and HBM gene sequences disclosed herein are used to identify homologous Zmax1 and HBM gene sequences and proteins in other species. These Zmax1 and HBM gene sequences and proteins are used in the diagnostic/prognostic, therapeutic and drug screening methods described herein for the species from which they have been isolated.

[0271] XVIII. Protein Expression and Purification

[0272] Expression and purification of the HBM protein of the invention can be performed essentially as outlined below. To facilitate the cloning, expression and purification of membrane and secreted protein from the HBM gene, a gene expression system, such as the pET System (Novagen), for cloning and expression of recombinant proteins in E. coli was selected. Also, a DNA sequence encoding a peptide tag, the His-Tap, was fused to the 3′ end of DNA sequences of interest to facilitate purification of the recombinant protein products. The 3′ end was selected for fusion to avoid alteration of any 5′ terminal signal sequence.

[0273] Nucleic acids chosen, for example, from the nucleic acids set forth in SEQ ID NOS: 1, 3 and 5-11 for cloning HBM were prepared by polymerase chain reaction (PCR). Synthetic oligonucleotide primers specific for the 5′ and 3′ ends of the HBM nucleotide sequence were designed and purchased from Life Technologies (Gaithersburg, Md.). All forward primers (specific for the 5′ end of the sequence) were designed to include an NcoI cloning site at the 5′ terminus. These primers were designed to permit initiation of protein translation at the methionine residue encoded within the NcoI site followed by a valine residue and the protein encoded by the HBM DNA sequence. All reverse primers (specific for the 3′ end of the sequence) included an EcoRI site at the 5′ terminus to permit cloning of the HBM sequence into the reading frame of the pET-28b. The pET-28b vector provided a sequence encoding an additional 20 carboxyl-terminal amino acids including six histidine residues (at the C-terminus), which comprised the histidine affinity tag.

[0274] Genomic DNA prepared from the HBM gene was used as the source of template DNA for PCR amplification (Ausubel et al, Current Protocols in Molecular Biology, John Wiley & Sons (1994)). To amplify a DNA sequence containing the HBM nucleotide sequence, genomic DNA (50 ng) was introduced into a reaction vial containing 2 mM MgCl₂, 1 μM synthetic oligonucleotide primers (forward and reverse primers) complementary to and flanking a defined HBM, 0.2 mM of each of deoxynucleotide triphosphate, dATP, dGTP, dCTP, dTTP and 2.5 units of heat stable DNA polymerase (Amplitaq, Roche Molecular Systems, Inc., Branchburg, N.J.) in a final volume of 100 microliters.

[0275] Upon completion of thermal cycling reactions, each sample of amplified DNA was purified using the Qiaquick Spin PCR purification kit (Qiagen, Gaithersburg, Md.). All amplified DNA samples were subjected to digestion with the restriction endonucleases, e.g., NcoI and EcoRI (New England BioLabs, Beverly, Mass.) (Ausubel et al, Current Protocols in Molecular Biology, John Wiley & Sons, Inc. (1994)). DNA samples were then subjected to electrophoresis on 1.0% NuSeive (FMC BioProducts, Rockland, Me.) agarose gels. DNA was visualized by exposure to ethidium bromide and long wave UV irradiation. DNA contained in slices isolated from the agarose gel was purified using the Bio 101 GeneClean Kit protocol (Bio 101, Vista, Calif.).

[0276] The pET-28b vector was prepared for cloning by digestion with restriction endonucleases, e.g., NcoI and EcoRI (New England BioLabs, Beverly, Mass.) (Ausubel et al, Current Protocols in Molecular Biology, John Wiley & Sons, Inc. (1994)). The pET-28a vector, which encodes the histidine affinity tag that can be fused to the 5′ end of an inserted gene, was prepared by digestion with appropriate restriction endonucleases.

[0277] Following digestion, DNA inserts were cloned (Ausubel et al, Current Protocols in Molecular Biology, John Wiley & Sons, Inc. (1994)) into the previously digested pET-28b expression vector. Products of the ligation reaction were then used to transform the BL21 strain of E. coli (Ausubel et al, Current Protocols in Molecular Biology, John Wiley & Sons, Inc. (1994)) as described below.

[0278] Competent bacteria, E. coli strain BL21 or E. coli strain BL21 (DE3), were transformed with recombinant pET expression plasmids carrying the cloned HBM sequence according to standard methods (Ausubel et al, Current Protocols in Molecular Biology, John Wiley & Sons, Inc. (1994)). Briefly, 1 μl of ligation reaction was mixed with 50 μl of electrocompetent cells and subjected to a high voltage pulse, after which samples were incubated in 0.45 ml SOC medium (0.5% yeast extract, 2.0% tryptone, 10 mM NaCl, 2.5 mM KCl, 10 mM MgCl₂, 10 mM MgSO₄ and 20 mM glucose) at 37° C. with shaking for 1 hour. Samples were then spread on LB agar plates containing 25 μg/ml kanamycin sulfate for growth overnight. Transformed colonies of BL21 were then picked and analyzed to evaluate cloned inserts, as described below.

[0279] Individual BL21 clones transformed with recombinant pET-28b HBM nucleotide sequences were analyzed by PCR amplification of the cloned inserts using the same forward and reverse primers specific for the HBM sequences that were used in the original PCR amplification cloning reactions. Successful amplification verifies the integration of the HBM sequence in the expression vector (Ausubel et al, Current Protocols in Molecular Biology, John Wiley & Sons, Inc. (1994)).

[0280] Individual clones of recombinant pET-28b vectors carrying properly cloned HBM nucleotide sequences were picked and incubated in 5 ml of LB broth plus 25 μg/ml kanamycin sulfate overnight. The following day plasmid DNA was isolated and purified using the Qiagen plasmid purification protocol (Qiagen Inc., Chatsworth, Calif.).

[0281] The pET vector can be propagated in any E. coli K-12 strain, e.g., HMS174, HB101, JM109, DH5 and the like, for purposes of cloning or plasmid preparation. Hosts for expression include E. coli strains containing a chromosomal copy of the gene for T7 RNA polymerase. These hosts were lysogens of bacteriophage DE3, a lambda derivative that carries the lacI gene, the lacUV5 promoter and the gene for T7 RNA polymerase. T7 RNA polymerase was induced by addition of isopropyl-β-D-thiogalactoside (IPTG), and the T7 RNA polymerase transcribes any target plasmid containing a functional T7 promoter, such as pET-28b, carrying its gene of interest. Strains include, for example, BL21(DE3) (Studier et al, Meth. Enzymol., 185:60-89 (1990)).

[0282] To express the recombinant HBM sequence, 50 ng of plasmid DNA are isolated as described above to transform competent BL21(DE3) bacteria as described above (provided by Novagen as part of the pET expression kit). The lacZ gene (β-galactosidase) is expressed in the pET-System as described for the HBM recombinant constructions. Transformed cells were cultured in SOC medium for 1 hour, and the culture was then plated on LB plates containing 25 μg/ml kanamycin sulfate. The following day, the bacterial colonies were pooled and grown in LB medium containing kanamycin sulfate (25 μg/ml) to an optical density at 600 nM of 0.5 to 1.0 O.D. units, at which point 1 mM IPTG was added to the culture for 3 hours to induce gene expression of the HBM recombinant DNA constructions.

[0283] After induction of gene expression with IPTG, bacteria were collected by centrifugation in a Sorvall RC-3B centrifuge at 3500×g for 15 minutes at 4° C. Pellets were resuspended in 50 ml of cold mM Tris-HCl, pH 8.0, 0.1 M NaCl and 0.1 mM EDTA (STE buffer). Cells were then centrifuged at 2000×g for 20 minutes at 4° C. Wet pellets were weighed and frozen at −80° C. until ready for protein purification.

[0284] A variety of methodologies known in the art can be used to purify the isolated proteins (Coligan et al, Current Protocols in Protein Science, John Wiley & Sons (1995)). For example, the frozen cells can be thawed, resuspended in buffer and ruptured by several passages through a small volume microfluidizer (Model M-110S, Microfluidics International Corp., Newton, Mass.). The resultant homogenate is centrifuged to yield a clear supernatant (crude extract) and, following filtration, the crude extract is fractioned over columns. Fractions are monitored by absorbance at OD₂₈₀ nm and peak fractions may be analyzed by SDS-PAGE.

[0285] The concentrations of purified protein preparations are quantified spectrophotometrically using absorbance coefficients calculated from amino acid content (Perkins, Eur. J. Biochem., 157:169-180 (1986)). Protein concentrations are also measured by the method of Bradford, Anal. Biochem., 72:248-254 (1976) and Lowry et al, J. Biol. Chem., 193:265-275 (1951) using bovine serum albumin as a standard.

[0286] SDS-polyacrylamide gels of various concentrations were purchased from BioRad (Hercules, Calif.), and stained with Coomassie blue. Molecular weight markers may include rabbit skeletal muscle myosin (200 kDa), E. coli β-galactosidase (116 kDa), rabbit muscle phosphorylase B (97.4 kDa), bovine serum albumin (66.2 kDa), ovalbumin (45 kDa), bovine carbonic anyhdrase (31 kDa), soybean trypsin inhibitor (21.5 kDa), egg white lysozyme (14.4 kDa) and bovine aprotinin (6.5 kDa).

[0287] Once a sufficient quantity of the desired protein has been obtained, it may be used for various purposes. A typical use is the production of antibodies specific for binding. These antibodies may be either polyclonal or monoclonal, and may be produced by in vitro or in vivo techniques well known in the art. Monoclonal antibodies to epitopes of any of the peptides identified and isolated as described can be prepared from murine hybridomas (Kohler, Nature, 256:495 (1975)). In summary, a mouse is inoculated with a few micrograms of HBM protein over a period of two weeks. The mouse is then sacrificed. The cells that produce antibodies are then removed from the mouse's spleen. The spleen cells are then fused with polyethylene glycol with mouse myeloma cells. The successfully fused cells are diluted in a microtiter plate and growth of the culture is continued. The amount of antibody per well is measured by immunoassay methods such as ELISA (Engvall, Meth. Enzymol., 70:419 (1980)). Clones producing antibody can be expanded and further propagated to produce HBM antibodies. Other suitable techniques involve in vitro exposure of lymphocytes to the antigenic polypeptides, or alternatively, to selection of libraries of antibodies in phage or similar vectors. See Huse et al, Science, 246:1275-1281 (1989). For additional information on antibody production see Davis et al, Basic Methods in Molecular Biology, Elsevier, NY, Section 21-2 (1989).

[0288] XIX. Methods of Use: Gene Therapy

[0289] In recent years, significant technological advances have been made in the area of gene therapy for both genetic and acquired diseases. (Kay et al, Proc. Natl. Acad. Sci. USA, 94:12744-12746 (1997)) Gene therapy can be defined as the deliberate transfer of DNA for therapeutic purposes. Improvement in gene transfer methods has allowed for development of gene therapy protocols for the treatment of diverse types of diseases. Gene therapy has also taken advantage of recent advances in the identification of new therapeutic genes, improvement in both viral and nonviral gene delivery systems, better understanding of gene regulation, and improvement in cell isolation and transplantation.

[0290] The preceding experiments identify the HBM gene as a dominant mutation conferring elevated bone mass. The fact that this mutation is dominant indicates that expression of the HBM protein causes elevated bone mass. Older individuals carrying the HBM gene, and, therefore expressing the HBM protein, do not suffer from osteoporosis. These individuals are equivalent to individuals being treated with the HBM protein. These observations are a strong experimental indication that therapeutic treatment with the HBM protein prevents osteoporosis. The bone mass elevating activity of the HBM gene is termed “HBM function.”

[0291] Therefore, according to the present invention, a method is also provided of supplying HBM function to mesenchymal stem cells (Onyia et al, J. Bone Miner. Res., 13:20-30 (1998); Ko et al, Cancer Res., 56:4614-4619 (1996)). Supplying such a function provides protection against osteoporosis. The HBM gene or a part of the gene may be introduced into the cell in a vector such that the gene remains extrachromosomal. In such a situation, the gene will be expressed by the cell from the extrachromosomal location.

[0292] Vectors for introduction of genes both for recombination and for extrachromosomal maintenance are known in the art, and any suitable vector may be used. Methods for introducing DNA into cells such as electroporation, calcium phosphate co-precipitation, and viral transduction are known in the art, and the choice of method is within the competence of one skilled in the art (Robbins, Ed., Gene Therapy Protocols, Human Press, NJ (1997)). Cells transformed with the HBM gene can be used as model systems to study osteoporosis and drug treatments that promote bone growth.

[0293] As generally discussed above, the HBM gene or fragment, where applicable, may be used in gene therapy methods in order to increase the amount of the expression products of such genes in mesenchymal stem cells. It may be useful also to increase the level of expression of a given HBM protein, or a fragment thereof, even in those cells in which the wild type gene is expressed normally. Gene therapy would be carried out according to generally accepted methods as described by, for example, Friedman, Therapy for Genetic Diseases, Friedman, Ed., Oxford University Press, pages 105-121 (1991).

[0294] A virus or plasmid vector containing a copy of the HBM gene linked to expression control elements and capable of replicating inside mesenchymal stem cells, is prepared. Suitable vectors are known and described, for example, in U.S. Pat. No. 5,252,479 and WO 93/07282, the disclosures of which are incorporated by reference herein in their entirety. The vector is then injected into the patient, either locally into the bone marrow or systemically (in order to reach any mesenchymal stem cells located at other sites, i.e., in the blood). If the transfected gene is not permanently incorporated into the genome of each of the targeted cells, the treatment may have to be repeated periodically.

[0295] Gene transfer systems known in the art may be useful in the practice of the gene therapy methods of the present invention. These include viral and non-viral transfer methods. A number of viruses have been used as gene transfer vectors, including polyoma, i.e., SV40 (Madzak et al, J. Gen. Virol., 73:1533-1536 (1992)), adenovirus (Berkner, Curr. Top. Microbiol. Immunol., 158:39-61 (1992); Berkner et al, Bio Techniques, 6:616-629 (1988); Gorziglia et al, J. Virol., 66:4407-4412 (1992); Quantin et al, Proc. Natl. Acad. Sci. USA, 89:2581-2584 (1992); Rosenfeld et al, Cell, 68:143-155 (1992); Wilkinson et al, Nucl. Acids Res., 20:2233-2239 (1992); Stratford-Perricaudet et al, Hum. Gene Ther., 1:241-256 (1990)), vaccinia virus (Mackett et al, Biotechnology; 24:495-499 (1992)), adeno-associated virus (Muzyczka, Curr. Top. Microbiol. Immunol., 158:91-123 (1992); Ohi et al, Gene, 89:279-282,(1990)), herpes viruses including HSV and EBV (Margolskee, Curr. Top. Microbiol. Immunol., 158:67-90 (1992); Johnson et al, J. Virol., 66:2952-2965 (1992); Fink et al, Hum. Gene Ther., 3:11-19 (1992); Breakfield et al, Mol. Neurobiol., 1:337-371 (1987;) Fresse et al, Biochem. Pharmacol., 40:2189-2199 (1990)), and retroviruses of avian (Brandyopadhyay et al, Mol. Cell Biol., 4:749-754 (1984); Petropouplos et al, J. Virol., 66:3391-3397 (1992)), murine (Miller, Curr. Top. Microbiol. Immunol., 158:1-24 (1992); Miller et al, Mol. Cell Biol., 5:431-437 (1985); Sorge et al, Mol. Cell Biol., 4:1730-1737 (1984); Mann et al, J. Virol., 54:401-407 (1985)), and human origin (Page et al, J. Virol., 64:5370-5276 (1990); Buchschalcher et al, J. Virol., 66:2731-2739 (1992)). Most human gene therapy protocols have been based on disabled murine retroviruses.

[0296] Non-viral gene transfer methods known in the art include chemical techniques such as calcium phosphate coprecipitation (Graham et al, Virology, 52:456-467 (1973); Pellicer et al, Science, 209:1414-1422 (1980)), mechanical techniques, for example microinjection (Anderson et al, Proc. Natl. Acad. Sci. USA, 77:5399-5403 (1980); Gordon et al, Proc. Natl. Acad. Sci. USA, 77:7380-7384 (1980); Brinster et al, Cell, 27:223-231 (1981); Constantini et al, Nature, 294:92-94 (1981)), membrane fusion-mediated transfer via liposomes (Felgner et al, Proc. Natl. Acad. Sci. USA, 84:7413-7417 (1987); Wang et al, Biochemistry, 28:9508-9514 (1989); Kaneda et al, J. Biol. Chem., 264:12126-12129 (1989); Stewart et al, Hum. Gene Ther., 3:267-275 (1992); Nabel et al, Science, 249:1285-1288 (1990); Lim et al, Circulation, 83:2007-2011 (1992)), and direct DNA uptake- and receptor-mediated DNA transfer (Wolff et al, Science, 247:1465-1468 (1990); Wu et al, BioTechniques, 11:474-485 (1991); Zenke et al, Proc. Natl. Acad. Sci. USA, 87:3655-3659 (1990); Wu et al, J. Biol. Chem., 264:16985-16987 (1989); Wolff et al, BioTechniques, 11:474-485 (1991); Wagner et al, 1990; Wagner et al, Proc. Natl. Acad. Sci. USA, 88:4255-4259 (1991); Cotten et al, Proc. Natl. Acad. Sci. USA, 87:4033-4037 (1990); Curiel et al, Proc. Natl. Acad. Sci. USA, 88:8850-8854 (1991); Curiel et al, Hum. Gene Ther., 3:147-154 (1991)). Viral-mediated gene transfer can be combined with direct in vivo vectors to the mesenchymal stem cells and not into the surrounding cells (Romano et al, In Vivo, 12(1):59-67 (1998); Gonez et al, Hum. Mol. Genetics, 7(12):1913-9 (1998)). Alternatively, the retroviral vector producer cell line can be injected into the bone marrow (Culver et al, Science, 256:1550-1552 (1992)). Injection of producer cells would then provide a continuous source of vector particles. This technique has been approved for use in humans with inoperable brain tumors.

[0297] In an approach which combines biological and physical gene transfer methods, plasmid DNA of any size is combined with a polylysine-conjugated antibody specific to the adenovirus hexon protein, and the resulting complex is bound to an adenovirus vector. The trimolecular complex is then used to infect cells. The adenovirus vector permits efficient binding, internalization, and degradation of the endosome before the coupled DNA is damaged.

[0298] Liposome/DNA complexes have been shown to be capable of mediating direct in vivo gene transfer. While in standard liposome preparations the gene transfer process is non-specific, localized in vivo uptake and expression have been reported in tumor deposits, for example, following direct in situ administration (Nabel, Hum. Gene Ther., 3:399-410 (1992)).

[0299] XX. Methods of Use: Transformed Hosts, Development of Pharmaceuticals and Research Tools

[0300] Cells and animals that carry the HBM gene can be used as model systems to study and test for substances that have potential as therapeutic agents (Onyia et al, J. Bone Miner. Res., 13:20-30 (1998); Broder et al, Bone, 21:225-235 (1997)). The cells are typically cultured mesenchymal stem cells. These may be isolated from individuals with somatic or germline HBM genes. Alternatively, the cell line can be engineered to carry the HBM gene, as described above. After a test substance is applied to the cells, the transformed phenotype of the cell is determined. Any trait of transformed cells can be assessed, including formation of bone matrix in culture (Broder et al, Bone, 21:225-235 (1997)), mechanical properties (Kizer et al, Proc. Natl. Acad. Sci. USA, 94:1013-1018 (1997)), and response to application of putative therapeutic agents.

[0301] Animals for testing therapeutic agents can be selected after treatment of germline cells or zygotes. Such treatments include insertion of the Zmax1 gene, as well as insertion of the HBM gene and disrupted homologous genes. Alternatively, the inserted Zmax1 gene(s) and/or HBM gene(s) of the animals may be disrupted by insertion or deletion mutation of other genetic alterations using conventional techniques, such as those described by, for example, Capechi, Science, 244:1288 (1989); Valancuis et al, Mol. Cell Biol., 11:1402 (1991); Hasty et al, Nature, 350:243 (1991); Shinkai et al, Cell, 68:855 (1992); Mombaerts et al, Cell, 68:869 (1992); Philpott et al, Science, 256:1448 (1992); Snouwaert et al, Science, 257:1083 (1992); Donehower et al, Nature, 356:215 (1992). After test substances have been administered to the animals, the growth of bone must be assessed. If the test substance enhances the growth of bone, then the test substance is a candidate therapeutic agent. These animal models provide an extremely important vehicle for potential therapeutic products.

[0302] Individuals carrying the HBM gene have elevated bone mass. The HBM gene causes this phenotype by altering the activities, levels, expression patterns, and modification states of other molecules involved in bone development. Using a variety of established techniques, it is possible to identify molecules, preferably proteins or mRNAs, whose activities, levels, expression patterns, and modification states are different between systems containing the Zmax1 gene and systems containing the HBM gene. Such systems can be, for example, cell-free extracts, cells, tissues or living organisms, such as mice or humans. For a mutant form of Zmax1, a complete deletion of Zmax1, mutations lacking the extracellular or intracellular portion of the protein, or any other mutation in the Zmax1 gene may be used. It is also possible to use expression of antisense Zmax1 RNA or oligonucleotides to inhibit production of the Zmax1 protein. For a mutant form of HBM, a complete deletion of HBM, mutations lacking the extracellular or intracellular portion of the HBM protein, or any other mutation in the HBM gene may be used. It is also possible to use expression of antisense HBM RNA or oligonucleotides to inhibit production of the HBM protein.

[0303] Molecules identified by comparison of Zmax1 systems and HBM systems can be used as surrogate markers in pharmaceutical development or in diagnosis of human or animal bone disease. Alternatively, such molecules may be used in treatment of bone disease. See, Schena et al, Science, 270:467-470 (1995).

[0304] For example, a transgenic mouse carrying the HBM gene in the mouse homologue is constructed. A mouse of the genotype HBM/+is viable, healthy and has elevated bone mass. To identify surrogate markers for elevated bone mass, HBM/+(i.e., heterozygous) and isogenic +/+(i.e., wild-type) mice are sacrificed. Bone tissue mRNA is extracted from each animal, and a “gene chip” corresponding to mRNAs expressed in the +/+individual is constructed. mRNA from different tissues is isolated from animals of each genotype, reverse-transcribed, fluorescently labeled, and then hybridized to gene fragments affixed to a solid support. The ratio of fluorescent intensity between the two populations is indicative of the relative abundance of the specific mRNAs in the +/+ and HBM/+animals. Genes encoding mRNAs over- and under-expressed relative to the wild-type control are candidates for genes coordinately regulated by the HBM gene.

[0305] One standard procedure for identification of new proteins that are part of the same signaling cascade as an already-discovered protein is as follows. Cells are treated with radioactive phosphorous, and the already-discovered protein is manipulated to be more ore less active. The phosphorylation state of other proteins in the cell is then monitored by polyacrylamide gel electrophoresis and autoradiography, or similar techniques. Levels of activity of the known protein may be manipulated by many methods, including, for example, comparing wild-type mutant proteins using specific inhibitors such as drugs or antibodies, simply adding or not adding a known extracellular protein, or using antisense inhibition of the expression of the known protein (Tamura et al, Science, 280(5369):1614-7 (1998); Meng, EMBO J., 17(15):4391-403 (1998); Cooper et al, Cell, 1:263-73 (1982)).

[0306] In another example, proteins with different levels of phosphorylation are identified in TE85 osteosarcoma cells expressing either a sense or antisense cDNA for Zmax1. TE85 cells normally express high levels of Zmax1 (Dong et al, Biochem. & Biophys. Res. Comm., 251:784-790 (1998)). Cells containing the sense construct express even higher levels of Zmax1, while cells expressing the antisense construct express lower levels. Cells are grown in the presence of ³²P, harvested, lysed, and the lysates run on SDS polyacrylamide gels to separate proteins, and the gels subjected to autoradiography (Ausubel et al, Current Protocols in Molecular Biology, John Wiley & Sons (1997)). Bands that differ in intensity between the sense and antisense cell lines represent phosphoproteins whose phosphorylation state or absolute level varies in response to levels of Zmax1. As an alternative to the ³²P-labeling, unlabeled proteins may be separated by SDS-PAGE and subjected to immunoblotting, using the commercially available anti-phosphotyrosine antibody as a probe (Thomas et al, Nature, 376(6537):267-71 (1995)). As an alternative to the expression of antisense RNA, transfection with chemically modified antisense oligonucleotides can be used (Woolf et al, Nucleic Acids Res., 18(7):1763-9 (1990)).

[0307] Many bone disorders, such as osteoporosis, have a slow onset and a slow response to treatment. It is therefore useful to develop surrogate markers for bone development and mineralization. Such markers can be useful in developing treatments for bone disorders, and for diagnosing patients who may be at risk for later development of bone disorders. Examples of preferred markers are N- and C-terminal telopeptide markers described, for example, in U.S. Pat. Nos. 5,455,179, 5,641,837 and 5,652,112, the disclosures of which are incorporated by reference herein in their entirety. In the area of HIV disease, CD4 counts and viral load are useful surrogate markers for disease progression (Vlahov et al, JAMA, 279(1):35-40 (1998)). There is a need for analogous surrogate markers in the area of bone disease.

[0308] A surrogate marker can be any characteristic that is easily tested and relatively insensitive to non-specific influences. For example, a surrogate marker can be a molecule such as a protein or mRNA in a tissue or in blood serum. Alternatively, a surrogate marker may be a diagnostic sign such as sensitivity to pain, a reflex response or the like.

[0309] In yet another example, surrogate markers for elevated bone mass are identified using a pedigree of humans carrying the HBM gene. Blood samples are withdrawn from three individuals that carry the HBM gene, and from three closely related individuals that do not. Proteins in the serum from these individuals are electrophoresed on a two dimensional gel system, in which one dimension separates proteins by size, and another dimension separates proteins by isoelectric point (Epstein et al, Electrophoresis, 17(11):1655-70 (1996)). Spots corresponding to proteins are identified. A few spots are expected to be present in different amounts or in slightly different positions for the HBM individuals compared to their normal relatives. These spots correspond to proteins that are candidate surrogate markers. The identities of the proteins are determined by microsequencing, and antibodies to the proteins can be produced by standard methods for use in diagnostic testing procedures. Diagnostic assays for HBM proteins or other candidate surrogate markers include using antibodies described in this invention and a reporter molecule to detect HBM in human body fluids, membranes, bones, cells, tissues or extracts thereof. The antibodies can be labeled by joining them covalently or noncovalently with a substance that provides a detectable signal. In many scientific and patent literature, a variety of reporter molecules or labels are described including radionuclides, enzymes, fluorescent, chemi-luminescent or chromogenic agents (U.S. Pat. Nos. 3,817,837; 3,850,752; 3,939,350; 3,996,345; 4,277,437; 4,275,149; and 4,366,241).

[0310] Using these antibodies, the levels of candidate surrogate markers are measured in normal individuals and in patients suffering from a bone disorder, such as osteoporosis, osteoporosis pseudoglioma, Engelmann's disease, Ribbing's disease, hyperphosphatasemia, Van Buchem's disease, melorheostosis, osteopetrosis, pychodysostosis, sclerosteosis, osteopoikilosis, acromegaly, Paget's disease, fibrous dysplasia, tubular stenosis, osteogenesis imperfecta, hypoparathyroidism, pseudohypoparathyroidism, pseudopseudohypoparathyroidism, primary and secondary hyperparathyroidism and associated syndromes, hypercalciuria, medullary carcinoma of the thyroid gland, osteomalacia and other diseases. Techniques for measuring levels of protein in serum in a clinical setting using antibodies are well established. A protein that is consistently present in higher or lower levels in individuals carrying a particular disease or type of disease is a useful surrogate marker.

[0311] A surrogate marker can be used in diagnosis of a bone disorder. For example, consider a child that present to a physician with a high frequency of bone fracture. The underlying cause may be child abuse, inappropriate behavior by the child, or a bone disorder. To rapidly test for a bone disorder, the levels of the surrogate marker protein are measured using the antibody described above.

[0312] Levels of modification states of surrogate markers can be measured as indicators of the likely effectiveness of a drug that is being developed. It is especially convenient to use surrogate markers in creating treatments for bone disorders, because alterations in bone development or mineralization may require a long time to be observed. For example, a set of bone mRNAs, termed the “HBM-inducible mRNA set” is found to be overexpressed in HBM/+mice as compared to +/+mice, as described above. Expression of this set can be used as a surrogate marker. Specifically, if treatment of +/+mice with a compound results in overexpression of the HBM-inducible mRNA set, then that compound is considered a promising candidate for further development.

[0313] This invention is particularly useful for screening compounds by using the Zmax1 or HBM protein or binding fragment thereof in any of a variety of drug screening techniques.

[0314] The Zmax1 or HBM protein or fragment employed in such a test may either be free in solution, affixed to a solid support, or borne on a cell surface. One method of drug screening utilizes eukaryotic or prokaryotic host cells which are stably transformed with recombinant nucleic acids expressing the protein or fragment, preferably in competitive binding assays. Such cells, either in viable or fixed form, can be used for standard binding assays. One may measure, for example, for the formation of complexes between a Zmax1 or HBM protein or fragment and the agent being tested, or examine the degree to which the formation of a complex between a Zmax1 or HBM protein or fragment and a known ligand is interfered with by the agent being tested.

[0315] Thus, the present invention provides methods of screening for drugs comprising contacting such an agent with a Zmax1 or HBM protein or fragment thereof and assaying (i) for the presence of a complex between the agent and the Zmax1 or HBM protein or fragment, or (ii) for the presence of a complex between the Zmax1 or HBM protein or fragment and a ligand, by methods well known in the art. In such competitive binding assays the Zmax1 or HBM protein or fragment is typically labeled. Free Zmax1 or HBM protein or fragment is separated from that present in a protein:protein complex, and the amount of free (i.e., uncomplexed) label is a measure of the binding of the agent being tested to Zmax1 or HBM or its interference with Zmax1 or HBM: ligand binding, respectively.

[0316] Another technique for drug screening provides high throughput screening for compounds having suitable binding affinity to the Zmax1 or HBM proteins and is described in detail in WO 84/03564. Briefly stated, large numbers of different small peptide test compounds are synthesized on a solid substrate, such as plastic pins or some other surface. The peptide test compounds are reacted with. Zmax1 or HBM proteins and washed. Bound Zmax1 or HBM protein is then detected by methods well known in the art. Purified Zmax1 or HBM can be coated directly onto plates for use in the aforementioned drug screening techniques. However, non-neutralizing antibodies to the protein can be used to capture antibodies to immobilize the Zmax1 or HBM protein on the solid phase.

[0317] This invention also contemplates the use of competitive drug screening assays in which neutralizing antibodies capable of specifically binding the Zmax1 or HBM protein compete with a test compound for binding to the Zmax1 or HBM protein or fragments thereof. In this manner, the antibodies can be used to detect the presence of any peptide that shares one or more antigenic determinants of the Zmax1 or HBM protein.

[0318] A further technique for drug screening involves the use of host eukaryotic cell lines or cells (such as described above) that have a nonfunctional Zmax1 or HBM gene. These host cell lines or cells are defective at the Zmax1 or HBM protein level. The host cell lines or cells are grown in the presence of drug compound. The rate of growth of the host cells is measured to determine if the compound is capable of regulating the growth of Zmax1 or HBM defective cells.

[0319] The goal of rational drug design is to produce structural analogs of biologically active proteins of interest or of small molecules with which they interact (e.g., agonists, antagonists, inhibitors) in order to fashion drugs which are, for example, more active or stable forms of the protein, or which, e.g., enhance or interfere with the function of a protein in vivo. See, e.g., Hodgson, Bio/Technology, 9:19-21 (1991). In one approach, one first determines the three-dimensional structure of a protein of interest (e.g., Zmax1 or HBM protein) or, for example, of the Zmax1- or HBM-receptor or ligand complex, by x-ray crystallography, by computer modeling or most typically, by a combination of approaches. Less often, useful information regarding the structure of a protein may be gained by modeling based on the structure of homologous proteins. An example of rational drug design is the development of HIV protease inhibitors (Erickson et al, Science, 249:527-533 (1990)). In addition, peptides (e.g., Zmax1 or HBM protein) are analyzed by an alanine scan (Wells, Methods in Enzymol., 202: 390-411 (1991)). In this technique, an amino acid residue is replaced by Ala, and its effect on the peptide's activity is determined. Each of the amino acid residues of the peptide is analyzed in this manner to determine the important regions of the peptide.

[0320] It is also possible to isolate a target-specific antibody, selected by a functional assay, and then to solve its crystal structure. In principle, this approach yields a pharmacore upon which subsequent drug design can be based. It is possible to bypass protein crystallography altogether by generating anti-idiotypic antibodies (anti-ids) to a functional, pharmacologically active antibody. As a mirror image of a mirror image, the binding site of the anti-ids would be expected to be an analog of the original receptor. The anti-id could then be used to identify and isolate peptides from banks of chemically or biologically produced banks of peptides. Selected peptides would then act as the pharmacore.

[0321] Thus, one may design drugs which have, e.g., improved Zmax1 or HBM protein activity or stability or which act as inhibitors, agonists, antagonists, etc. of Zmax1 or HBM protein activity. By virtue of the availability of cloned Zmax1 or HBM sequences, sufficient amounts of the Zmax1 or HBM protein may be made available to perform such analytical studies as x-ray crystallography. In addition, the knowledge of the Zmax1 or HBM protein sequence provided herein will guide those employing computer modeling techniques in place of, or in addition to x-ray crystallography.

[0322] XXI. Methods of Use: Avian and Mammalian Animal Husbandry

[0323] The Zmax1 DNA and Zmax1 protein and/or the HBM DNA and HBM protein can be used for vertebrate and preferably human therapeutic agents and for avian and mammalian veterinary agents, including for livestock breeding. Birds, including, for example, chickens, roosters, hens, turkeys, ostriches, ducks, pheasants and quails, can benefit from the identification of the gene and pathway for high bone mass. In many examples cited in literature (for example, McCoy et al, Res. Vet. Sci., 60(2): 185-186 (1996)), weakened bones due to husbandry conditions cause cage layer fatigue, osteoporosis and high mortality rates. Additional therapeutic agents to treat osteoporosis or other bone disorders in birds can have considerable beneficial effects on avian welfare and the economic conditions of the livestock industry, including, for example, meat and egg production.

[0324] XXII. Methods of Use: Diagnostic Assays using Zmax1-Specific Oligonucleotides for Detection of Genetic Alterations Affecting Bone Development.

[0325] In cases where an alteration or disease of bone development is suspected to involve an alteration of the Zmax1 gene or the HBM gene, specific oligonucleotides may be constructed and used to assess the level of Zmax1 mRNA or HBM mRNA, respectively, in bone tissue or in another tissue that affects bone development.

[0326] For example, to test whether a person has the HBM gene, which affects bone density, polymerase chain reaction can be used. Two oligonucleotides are synthesized by standard methods or are obtained from a commercial supplier of custom-made oligonucleotides. The length and base composition are determined by standard criteria using the Oligo 4.0 primer Picking program (Wojchich Rychlik, 1992). One of the oligonucleotides is designed so that it will hybridize only to HBM DNA under the PCR conditions used. The other oligonucleotide is designed to hybridize a segment of Zmax1 genomic DNA such that amplification of DNA using these oligonucleotide primers produces a conveniently identified DNA fragment. For example, the pair of primers CCAAGTTCTGAGAAGTCC (SEQ ID NO:32) and AATACCTGAAACCATACCTG (SEQ ID NO:33) will amplify a 530 base pair DNA fragment from a DNA sample when the following conditions are used: step 1 at 95° C. for 120 seconds; step 2 at 95° C. for 30 seconds; step 3 at 58° C. for 30 seconds; step 4 at 72° C. for 120 seconds; where steps 2-4 are repeated 35 times. Tissue samples may be obtained from hair follicles, whole blood, or the buccal cavity.

[0327] The fragment generated by the above procedure is sequenced by standard techniques. Individuals heterozygous for the HBM gene will show an equal amount of G and T at the second position in the codon for glycine 171. Normal or homozygous wild-type individuals will show only G at this position. Other amplification techniques besides PCR may be used as alternatives, such as ligation-mediated PCR or techniques involving Q-beta replicase (Cahill et al, Clin. Chem., 37(9):1482-5 (1991)). For example, the oligonucleotides AGCTGCTCGT AGCTG TCTCTCCCTGGATCACGGGTACATGTACTGGACAGACTGGGT (SEQ ID NO:34) and TGAGACGCCCCGGATTGAGCGGGCAGGGATAGCTTA TTCCCTGTGCCGCATTACGGC (SEQ ID NO:35) can be hybridized to a denatured human DNA sample, treated with a DNA ligase, and then subjected to PCR amplification using the primer oligonucleotides AGCTGCTCGTAGCTGTCT CTCCCTGGA (SEQ ID NO:36) and GCCGTAATGCGGCACAGGGAATAAGCT (SEQ ID NO:37). In the first two oligonucleotides, the outer 27 bases are random sequence corresponding to primer binding sites, and the inner 30 bases correspond to sequences in the Zmax1 gene. The T at the end of the first oligonucleotide corresponds to the HBM gene. The first two oligonucleotides are ligated only when hybridized to human DNA carrying the HBM gene, which results in the formation of an amplifiable 114 bp DNA fragment.

[0328] Products of amplification can be detected by agarose gel electrophoresis, quantitative hybridization, or equivalent techniques for nucleic acid detection known to one skilled in the art of molecular biology (Sambrook et al, Molecular Cloning: A Laboratory Manual, Cold Spring Harbor Laboratory, Cold Spring, N.Y. (1989)).

[0329] Other alterations in the Zmax1 gene or the HBM gene may be diagnosed by the same type of amplification-detection procedures, by using oligonucleotides designed to identify those alterations. These procedures can be used in animals as well as humans to identify alterations in Zmax1 or HBM that affect bone development.

[0330] Expression of Zmax1 or HBM in bone tissue may be accomplished by fusing the cDNA of Zmax1 or HBM, respectively, to a bone-specific promoter in the context of a vector for genetically engineering vertebrate cells. DNA constructs are introduced into cells by packaging the DNA into virus capsids, by the use of cationic liposomes, electroporation, or by calcium phosphate transfection. Transfected cells, preferably osteoblasts, may be studied in culture or may be introduced into bone tissue in animals by direct injection into bone or by intravenous injection of osteoblasts, followed by incorporation into bone tissue (Ko et al, Cancer Research, 56(20):4614-9 (1996)). For example, the osteocalcin promoter, which is specifically active in osteoblasts, may be used to direct transcription of the Zmax1 gene or the HBM gene. Any of several vectors and transfection methods may be used, such as retroviral vectors, adenovirus vectors, or vectors that are maintained after transfection using cationic liposomes, or other methods and vectors described herein.

[0331] Alteration of the level of functional Zmax1 protein or HBM protein affects the level of bone mineralization. By manipulating levels of functional Zmax1 protein or HBM protein, it is possible to affect bone development and to increase or decrease levels of bone mineralization. For example, it may be useful to increase bone mineralization in patients with osteoporosis. Alternatively, it may be useful to decrease bone mineralization in patients with osteopetrosis or Paget's disease. Alteration of Zmax1 levels or HBM levels can also be used as a research tool. Specifically, it is possible to identify proteins, mRNA and other molecules whose level or modification status is altered in response to changes in functional levels of Zmax1 or HBM. The pathology and pathogenesis of bone disorders is known and described, for example, in Rubin and Farber (Eds.), Pathology, 2nd Ed., S. B. Lippincott Co., Philadelphia, Pa. (1994).

[0332] A variety of techniques can be used to alter the levels of functional Zmax1 or HBM. For example, intravenous or intraosseous injection of the extracellular portion of Zmax1 or mutations thereof, or HBM or mutations thereof, will alter the level of Zmax1 activity or HBM activity, respectively, in the body of the treated human, animal or bird. Truncated versions of the Zmax1 protein or HBM protein can also be injected to alter the levels of functional Zmax1 protein or HBM protein, respectively. Certain forms of Zmax1 or HBM enhance the activity of endogenous protein, while other forms are inhibitory.

[0333] In a preferred embodiment, the HBM protein is used to treat osteoporosis. In a further preferred embodiment, the extracellular portion of the HBM protein is used. This HBM protein may be optionally modified by the addition of a moiety that causes the protein to adhere to the surface of cells. The protein is prepared in a pharmaceutically acceptable solution and is administered by injection or another method that achieves acceptable pharmacokinetics and distribution.

[0334] In a second embodiment of this method, Zmax1 or HBM levels are increased or decreased by gene therapy techniques. To increase Zmax1 or HBM levels, osteoblasts or another useful cell type are genetically engineered to express high levels of Zmax1 or HBM as described above. Alternatively, to decrease Zmax1 or HBM levels, antisense constructs that specifically reduce the level of translatable Zmax1 or HBM mRNA can be used. In general, a tissue-nonspecific promoter may be used, such as the CMV promoter or another commercially available promoter found in expression vectors (Wu et al, Toxicol. Appl. Pharmacol., 141(1):330-9 (1996)). In a preferred embodiment, a Zmax1 cDNA or its antisense is transcribed by a bone-specific promoter, such as the osteocalcin or another promoter, to achieve specific expression in bone tissue. In this way, if a Zmax1-expressing DNA construct or HBM-expressing construct is introduced into non-bone tissue, it will not be expressed.

[0335] In a third embodiment of this method, antibodies against Zmax1 or HBM are used to inhibit its function. Such antibodies are identified herein.

[0336] In a fourth embodiment of this method, drugs that inhibit Zmax1 function or HBM function are used. Such drugs are described herein and optimized according to techniques of medicinal chemistry well known to one skilled in the art of pharmaceutical development.

[0337] Zmax1 and HBM interact with several proteins, such as ApoE. Molecules that inhibit the interaction between Zmax1 or HBM and ApoE or another binding partner are expected to alter bone development and mineralization. Such inhibitors may be useful as drugs in the treatment of osteoporosis, osteopetrosis, or other diseases of bone mineralization. Such inhibitors may be low molecular weight compounds, proteins or other types of molecules. See, Kim et al, J. Biochem. (Tokyo), 124(6):1072-1076 (1998).

[0338] Inhibitors of the interaction between Zmax1 or HBM and interacting proteins may be isolated by standard drug-screening techniques. For example, Zmax1 protein, (or a fragment thereof) or HBM protein (or a fragment thereof) can be immobilized on a solid support such as the base of microtiter well. A second protein or protein fragment, such as ApoE is derivatized to aid in detection, for example with fluorescein. Iodine, or biotin, then added to the Zmax1 or HBM in the presence of candidate compounds that may specifically inhibit this protein-protein domain of Zmax1 or HBM, respectively, and thus avoid problems associated with its transmembrane segment. Drug screens of this type are well known to one skilled in the art of pharmaceutical development.

[0339] Because Zmax1 and HBM are involved in bone development, proteins that bind to Zmax1 and HBM are also expected to be involved in bone development. Such binding proteins can be identified by standard methods, such as co-immunoprecipitation, co-fractionation, or the two-hybrid screen (Ausubel et al, Current Protocols in Molecular Biology, John Wiley & Sons (1997)). For example, to identify Zmax1-interacting proteins or HBM-interacting proteins using the two-hybrid system, the extracellular domain of Zmax1 or HBM is fused to LexA and expressed for the yeast vector pEG202 (the “bait”) and expressed in the yeast strain EGY48. The yeast strain is transformed with a “prey” library in the appropriate vector, which encodes a galactose-inducible transcription-activation sequence fused to candidate interacting proteins. The techniques for initially selecting and subsequently verifying interacting proteins by this method are well known to one skilled in the art of molecular biology (Ausubel et al, Current Protocols in Molecular Biology, John Wiley & Sons (1997)).

[0340] In a preferred embodiment, proteins that interact with HBM, but not Zmax1, are identified using a variation of the above procedure (Xu et al, Proc. Natl. Acad. Sci USA, 94(23):12473-8 (November 1997)). This variation of the two-hybrid system uses two baits, and Zmax1 and HBM are each fused to LexA and TetR, respectively. Alternatively, proteins that interact with the HBM but not Zmax1 are also isolated. These procedures are well known to one skilled in the art of molecular biology, and are a simple variation of standard two-hybrid procedures.

[0341] As an alternative method of isolating Zmax1 or HBM interacting proteins, a biochemical approach is used. The Zmax1 protein or a fragment thereof, such as the extracellular domain, or the HBM protein or a fragment thereof, such as the extracellular domain, is chemically coupled to Sepharose beads. The Zmax1- or HBM-coupled beads are poured into a column. An extract of proteins, such as serum proteins, proteins in the supernatant of a bone biopsy, or intracellular proteins from gently lysed TE85 osteoblastic cells, is added to the column. Non-specifically bound proteins are eluted, the column is washed several times with a low-salt buffer, and then tightly binding proteins are eluted with a high-salt buffer. These are candidate proteins that bind to Zmax1 or HBM, and can be tested for specific binding by standard tests and control experiments. Sepharose beads used for coupling proteins and the methods for performing the coupling are commercially available (Sigma), and the procedures described here are well known to one skilled in the art of protein biochemistry.

[0342] As a variation of the above procedure, proteins that are eluted by high salt from the Zmax1- or HBM-Sepharose column are then added to an HBM-Zmax1-sepharose column. Proteins that flow through without sticking are proteins that bind to Zmax1 but not to HBM. Alternatively, proteins that bind to the HBM protein and not to the Zmax1 protein can be isolated by reversing the order in which the columns are used.

[0343] XXIII. Method of Use: Transformation-Associated Recombination (TAR) Cloning

[0344] Essential for the identification of novel allelic variants of Zmax1 is the ability to examine the sequence of both copies of the gene in an individual. To accomplish this, two “hooks,” or regions of significant similarity, are identified within the genomic sequence such that they flank the portion of DNA that is to be cloned. Most preferably, the first of these hooks is derived from sequences 5′ to the first exon of interest and the second is derived from sequences 3′ to the last exon of interest. These two “hooks” are cloned into a bacterial/yeast shuttle vector such as that described by Larionov et al, Proc. Natl. Acad. Sci. USA, 94:7384-7387 (1997). Other similar vector systems may also be used. To recover the entire genomic copy of the Zmax1 gene, the plasmid containing the two “hooks” is linearized with a restriction endonuclease or is produced by another method such as PCR. This linear DNA fragment is introduced into yeast cells along with human genomic DNA. Typically, the yeast Saccharomyces cerevisiae is used as a host cell, although Larionov et al (in press) have reported using chicken host cells as well. During and after the process of transformation, the endogenous host cell converts the linear plasmid to a circle by a recombination event whereby the region of the human genomic DNA homologous to the “hooks” is inserted into the plasmid. This plasmid can be recovered and analyzed by methods well known to one skilled in the art. Obviously, the specificity for this reaction requires the host cell machinery to recognize sequences similar to the “hooks” present in the linear fragment. However, 100% sequence identity is not required, as shown by Kouprina et al, Genomics, 53(1):21-28 (October 1998), where the author describes using degenerate repeated sequences common in the human genome to recover fragments of human DNA from a rodent/human hybrid cell line.

[0345] In another example, only one “hook” is required, as described by Larionov et al, Proc. Natl. Acad. Sci. USA, 95(8):4469-74 (April 1998). For this type of experiment, termed “radial TAR cloning,” the other region of sequence similarity to drive the recombination is derived from a repeated sequence from the genome. In this way, regions of DNA adjacent to the Zmax1 gene coding region can be recovered and examined for alterations that may affect function.

[0346] XXIV. Methods of Use: Genomic Screening

[0347] The use of polymorphic genetic markers linked to the HBM gene or to Zmax1 is very useful in predicting susceptibility to osteoporosis or other bone diseases. Koller et al, Amer. J Bone Min. Res., 13:1903-1908 (1998) have demonstrated that the use of polymorphic genetic markers is useful for linkage analysis. Similarly, the identification of polymorphic genetic markers within the high bone mass gene will allow the identification of specific allelic variants that are in linkage disequilibrium with other genetic lesions that affect bone development. Using the DNA sequence from the BACs, a dinucleotide CAn repeat was identified and two unique PCR primers that will amplify the genomic DNA containing this repeat were designed, as shown below:

| | | |
|---|---|---|
| B200E21C16_L: | GAGAGGCTATATCCCTGGGC | (SEQ ID NO:38) |
| B200E21C16_R: | ACAGCACGTGTTTAAAGGGG | (SEQ ID NO:39) |

[0348] and used in the genetic mapping study.

[0349] This method has been used successfully by others skilled in the art (e.g., Sheffield et al, Genet., 4:1837-1844 (1995); LeBlanc-Straceski et al, Genomics, 19:341-9 (1994); Chen et al, Genomics, 25:1-8 (1995)). Use of these reagents, with populations or individuals will predict their risk for osteoporosis. Similarly, single nucleotide polymorphisms (SNPs), such as those shown in Table 4 above, can be used as well to predict risk for developing bone diseases or resistance to osteoporosis in the case of the HBM gene.

[0350] XXV. Methods of Use: Modulators of Tissue Calcification

[0351] The calcification of tissues in the human body is well documented. Towler et al, J. Biol. Chem., 273:30427-34 (1998) demonstrated that several proteins known to regulate calcification of the developing skull in a model system are expressed in calcified aorta. The expression of Msx2, a gene transcribed in osteoprogenitor cells, in calcified vascular tissue indicates that genes which are important in bone development are involved in calcification of other tissues. Treatment with HBM protein, agonists or antagonists is likely to ameliorate calcification (such as the vasculature, dentin and bone of the skull visera) due to its demonstrated effect on bone mineral density. In experimental systems where tissue calcification is demonstrated, the over-expression or repression of Zmax1 activity permits the identification of molecules that are directly regulated by the Zmax1 gene. These genes are potential targets for therapeutics aimed at modulating tissue calcification. For example, an animal, such as the LDLR −/−, mouse is fed a high fat diet and is observed to demonstrate expression of markers of tissue calcification, including Zmax1. These animals are then treated with antibodies to Zmax1 or HBM protein, antisense oligonucleotides directed against Zmax1 or HBM cDNA, or with compounds known to bind the Zmax1 or HBM protein or its binding partner or ligand. RNA or proteins are extracted from the vascular tissue and the relative expression levels of the genes expressed in the tissue are determined by methods well known in the art. Genes that are regulated in the tissue are potential therapeutic targets for pharmaceutical development as modulators of tissue calcification.

[0352] The nucleic acids, proteins, peptides, amino acids, small molecules or other pharmaceutically useful compounds of the present invention that are to be given to an individual may be administered in the form of a composition with a pharmaceutically acceptable carrier, excipient or diluent, which are well known in the art. The individual may be a mammal or a bird, preferably a human, a rat, a mouse or bird. Such compositions may be administered to an individual in a pharmaceutically effective amount. The amount administered will vary depending on the condition being treated and the patient being treated. The compositions may be administered alone or in combination with other treatments.

### EXAMPLES

[0353] The present invention is described by reference to the following Examples, which are offered by way of illustration and are not intended to limit the invention in any manner. Standard techniques well known in the art or the techniques specifically described below were utilized.

### Example 1

[0354] The propositus was referred by her physicians to the Creighton Osteoporosis Center for evaluation of what appeared to be unusually dense bones. She was 18 years old and came to medical attention two years previous because of back pain, which was precipitated by an auto accident in which the car in which she was riding as a passenger was struck from behind. Her only injury was soft tissue injury to her lower back that was manifested by pain and muscle tenderness. There was no evidence of fracture or subluxation on radiographs. The pain lasted for two years, although she was able to attend school full time. By the time she was seen in the Center, the pain was nearly resolved and she was back to her usual activities as a high school student. Physical exam revealed a normal healthy young woman standing 66 inches and weighing 128 pounds. Radiographs of the entire skeleton revealed dense looking bones with thick cortices. All bones of the skeleton were involved. Most importantly, the shapes of all the bones were entirely normal. The spinal BMC was 94.48 grams in L1-4, and the spinal BMD was 1.667 gm/cm² in L1-4. BMD was 5.62 standard deviations (SD) above peak skeletal mass for women. These were measured by DXA using a Hologic 2000˜. Her mother was then scanned and a lumbar spinal BMC of 58.05 grams and BMD of 1.500 gm/cm² were found. Her mother's values place her 4.12 SD above peak mass and 4.98 SD above her peers. Her mother was 51 years old, stood 65 inches and weighed 140 pounds. Her mother was in excellent health with no history of musculoskeletal or other symptoms. Her father's lumbar BMC was 75.33 grams and his BMD was 1.118 gm/cm². These values place him 0.25 SD above peak bone mass for males. He was in good health, stood 72 inches tall, and weighed 187 pounds.

[0355] These clinical data suggested that the propositus inherited a trait from her mother, which resulted in very high bone mass, but an otherwise normal skeleton, and attention was focused on the maternal kindred. In U.S. Pat. No. 5,691,153, twenty-two of these members had measurement of bone mass by DXA. In one case, the maternal grandfather of the propositus, was deceased, however, medical records, antemortem skeletal radiographs and a gall bladder specimen embedded in paraffin for DNA genotyping were obtained. His radiographs showed obvious extreme density of all of the bones available for examination including the femur and the spine, and he was included among the affected members. In this invention, the pedigree has been expanded to include 37 informative individuals. These additions are a significant improvement over the original kinship (Johnson et al, Am. J. Hum. Genet., 60:1326-1332 (1997)) because, among the fourteen individuals added since the original study, two individuals harbor key crossovers. X-linkage is ruled out by the presence of male-to-male transmission from individual 12 to 14 and 15.

### Example 2

[0356] The present invention describes DNA sequences derived from two BAC clones from the HBM gene region, as evident in Table 7 below, which is an assembly of these clones. Clone b200e21-h (ATCC No. 980812; SEQ ID NOS: 10-11) was deposited at the American Type Culture Collection (ATCC), 10801 University Blvd., Manassas, Va. 20110-2209 U.S.A., on Dec. 30, 1997. Clone b527d12-h (ATCC No. 980720; SEQ ID NOS: 5-9) was deposited at the American Type Culture Collection (ATCC), 10801 University Blvd., Manassas, Va. 20110-2209 U.S.A., on Oct. 2, 1998. These sequences are unique reagents that can be used by one skilled in the art to identify DNA probes for the Zmax1 gene, PCR primers to amplify the gene, nucleotide polymorphisms in the Zmax1 gene, or regulatory elements of the Zmax1 gene.

TABLE 7

| | | SEQ ID | Length |
|---|---|---|---|
| Contig | ATCC No. | NO. | (base pairs) |
| b527d12-h_contig302G | 980720 | 5 | 3096 |
| b527d12-h_contig306G | 980720 | 6 | 26928 |
| b527d12-h_contig307G | 980720 | 7 | 29430 |
| b527d12-h_contig308G | 980720 | 8 | 33769 |
| b527d12-h_contig309G | 980720 | 9 | 72049 |
| b200e21-h_contig1 | 980812 | 10 | 8705 |
| b200e21-h_contig4 | 980812 | 11 | 66933 |

[0357] The disclosure of each of the patents, patent applications and publications cited in the specification is hereby incorporated by reference herein in its entirety.

[0358] Although the invention has been set forth in detail, one skilled in the art will recognize that numerous changes and modifications can be made, and that such changes and modifications may be made without departing from the spirit and scope of the invention.

[0359] This application claims priority to U.S. application Ser. Nos. 09/543,771 and 09/544,398 filed on Apr. 5, 2000, which are a continuation-in-part of application Ser. No. 09/229,319, filed Jan. 13, 1999, which claims benefit of U.S. Provisional Application No. 60/071,449, filed Jan. 13, 1998, and U.S. Provisional Application No. 60/105,511, filed Oct. 23, 1998, all of which are herein incorporated by reference in their entirety.

What is claimed is:

1. An isolated nucleic acid sequence of SEQ ID NO: 2.

2. The isolated nucleic acid sequence of claim 1, wherein the nucleic acid sequence is DNA.

3. An isolated amino acid sequence of SEQ ID NO: 4.

4. A nucleic acid sequence encoding the amino acid sequence of SEQ ID NO:4.

5. A replicative cloning vector comprising the nucleic acid sequence of claim 1 and a replicon operative in an isolated host cell.

6. An isolated host cell transformed with the replicative cloning vector of claim 5.

7. An expression vector comprising the nucleic acid sequence of claim 1 operably linked to a transcription regulatory region.

8. An isolated host cell transformed with the expression vector of claim 7.

9. A method for testing a substance as a therapeutic agent for bone modulation in a host comprising administering the nucleic acid of claim 1 to the host, and assessing whether bone modulation occurs.

10. The method of claim 9, wherein the host is a cell or an animal.

11. The method of claim 10, wherein the animal is a human, a rodent or a bird.

12. A method of identifying a molecule involved in bone modulation comprising identifying a molecule that binds to, or that inhibits binding of a molecule to, HBM.

13. The method of claim 12, wherein said molecule is a protein.

14. A method for identifying a protein involved in bone modulation comprising identifying a protein that has an expression level that is different in a first host comprising the Zmax1 gene when compared to a second host comprising the HBM gene.

15. The method of claim 14, wherein the host is a cell or an animal.

16. A method of identifying a candidate protein involved in bone modulation comprising
identifying a protein in a first individual having the high bone mass phenotype;
identifying a protein in a second individual not having the high bone mass phenotype;
comparing the protein of the first individual to the protein of the second individual, wherein (i) the protein that is present in the first individual but not the second individual is the candidate protein or (ii) the protein that is present in a higher amount in the first individual than in the second individual is the candidate protein or (iii) the protein that is present in a lower amount in the first individual than in the second individual is the candidate protein.

17. The method of claim 16, further comprising producing an antibody to the candidate protein.

18. A method of identifying a candidate protein involved in bone modulation comprising
identifying a protein in a first individual having the high bone mass phenotype;
identifying a protein in a second individual not having the high bone mass phenotype; and
comparing the protein of the first individual to the protein of the second individual, wherein (i) the protein that is present in the second individual but not the first individual is the candidate protein or (ii) the protein that is present in a higher amount in the second individual than in the first individual is the candidate protein or (iii) the protein that is present in a lower amount in the second individual than in the first individual is the candidate protein.

19. The method of claim 18, further comprising producing an antibody to the candidate protein.

20. A method of testing for HBM activity comprising immobilizing an HBM protein, binding a protein to the HBM protein, and measuring the extent of binding.

21. The method of claim 20, wherein the protein is ApoE.

22. A method for identification of a candidate molecule involved in bone modulation comprising
identifying a molecule that binds to, or that inhibits binding of a molecule to, the nucleic acid sequence of SEQ ID NO: 1;
identifying a molecule that binds to, or that inhibits binding of a molecule to, the nucleic acid sequence of SEQ ID NO: 2; and
comparing the extent of binding, or the extent of inhibition of binding, of the molecule to each nucleic acid sequence, wherein the molecule that binds, or inhibits binding, more or less to the nucleic acid sequence of SEQ ID NO: 2 or the nucleic acid sequence of SEQ ID NO: 1 is the candidate molecule.

23. The method of claim 22, wherein the candidate molecule is a protein or an mRNA.

24. A method of pharmaceutical development for treatment of bone development disorders comprising identifying a molecule that binds to the amino acid sequence of SEQ ID NO: 4.

25. The method of claim 24, wherein the molecule inhibits or enhances the function of the amino acid.

26. A method of pharmaceutical development for treatment of bone development disorders comprising
constructing a first host that contains the Zmax1 gene or protein;
constructing a second host that contains the HBM gene or protein;
analyzing a difference between the first host and the second host;
identifying a molecule that, when added to the first host, causes the first host to exhibit a characteristic feature of the second host.

27. The method of claim 26, wherein the host is a cell-free extract, a cell or an animal.

28. The method of claim 26, wherein the difference is a surrogate marker.

29. A method for treating a bone development disorder in an animal comprising transferring the nucleic acid sequence of claim 1 into a somatic cell of an animal suffering from a bone development disorder.

30. The method of claim 29, wherein the animal is a human or a bird.

31. A method for treating a bone development disorder in an animal comprising transferring the nucleic acid sequence of claim 1 into a germ-line cell of an animal suffering from a bone development disorder.

32. The method of claim 31, wherein the animal is a human or a bird.

33. A method of altering bone development in a host comprising administering the amino acid sequence of claim 3 to a somatic cell of a host suffering from a bone development disorder.

34. The method of claim 33, wherein the host is a human or a bird.

35. A method of altering bone development in a host comprising administering the amino acid sequence of claim 3 to a germ-line cell in a host suffering from a bone development disorder.

36. The method of claim 35, wherein the animal is a human or a bird.

37. A method of treating osteoporosis comprising administering the amino acid sequence of claim 3 to a patient in need thereof.

38. The method of claim 37, wherein the patient is a human or a bird.

39. A method of treating osteoporosis comprising administering the extracellular domain of the amino acid sequence of claim 3 to a patient in need thereof.

40. The method of claim 39, wherein the patient is a human or a bird.

41. A method of treating osteoporosis comprising administering the intracellular domain of the amino acid sequence of claim 3 to a patient in need thereof.

42. The method of claim 41, wherein the patient is a human or a bird.

43. A method for treating bone development disorders comprising administering a molecule that binds to the nucleic acid sequence of claim 1 to a patient in need thereof.

44. The method of claim 43, wherein the patient is a human or a bird.

45. A method for treating bone development disorders comprising administering an antibody to a patient in need thereof, wherein the antibody is to the amino acid sequence of claim 3.

46. A method for diagnostic screening for a genetic predisposition to a bone development disorder comprising screening a sample from a patient with a nucleotide sequence derived from the genomic or cDNA nucleic acid sequence of HBM or Zmax1.

47. A diagnostic assay for bone development disorders comprising an antibody to the HBM protein.

48. A method for identifying a genetic predisposition to bone development disorders comprising performing a haplotype analysis using the nucleic acid sequence of claim 1 or the nucleic acid of SEQ ID NO: 1.

49. A method of expressing the HBM protein in bone tissue comprising constructing an expression vector comprising a promoter that directs expression in bone tissue operably linked to the nucleic acid sequence of claim 1.

50. The method of claim 49, wherein the promoter that directs expression in bone is an osteocalcin promoter, a bone sialoprotein promoter or an AML-3 promoter.

51. A bacterial artificial chromosome having the nucleic acid sequence of SEQ ID NO: 5, 6, 7, 8, 9, 10 or 11.

52. A method for amplifying a nucleotide polymorphism in the Zmax1 gene comprising using the bacterial artificial chromosome of claim 51.

53. A method for amplifying a nucleotide polymorphism in the HBM gene comprising using the bacterial artificial chromosome of claim 51.

54. A method for identifying a regulatory element of a HBM gene comprising using the bacterial artificial chromosome of claim 1 or claim 51.

55. An isolated nucleic acid sequence comprising at least 15 contiguous nucleotides of SEQ ID NO: 2, wherein said 15 contiguous nucleotides comprise position 582 of SEQ ID NO: 2.

56. The isolated nucleic acid sequence of claim 55 that is DNA.

57. The isolated nucleic acid sequence of claim 55 that is RNA.

58. A replicative cloning vector comprising the nucleic acid sequence of claim 55 and a replicon operative in a host cell.

59. An isolated host cell transformed with the replicative cloning vector of claim 58.

60. An expression vector comprising the nucleic acid sequence of claim 55 operably linked to a transcription regulatory region.

61. An isolated host cell transformed with the expression vector of claim 60.

62. An isolated nucleic acid sequence comprising at least 15 contiguous nucleotides of SEQ ID NO: 2, wherein said 15 contiguous nucleotides comprise position 582 of SEQ ID NO: 2, and which encodes for an amino acid sequence including a valine corresponding to valine at position 171 of SEQ ID NO: 4 and wherein valine substitution is associated with a high bone mass phenotype.

63. The nucleic acid sequence of claim 62 which is DNA.

64. An isolated nucleic acid segment of at least 15 contiguous nucleotides including a polymorphic site from the nucleic acid sequence of SEQ ID NO: 2 in which G at position 582 is replaced by T, and sequences complementary thereto.

65. The isolated nucleic acid segment of claim 64, wherein said complementary sequence is the reverse complement.

66. The isolated nucleic acid segment of claim 65, wherein said reverse complementary sequence is mRNA.

67. The isolated nucleic acid segment of claim 64 that is DNA.

68. The isolated nucleic acid segment of claim 64 that is cDNA.

69. The isolated nucleic acid segment of claim 65 that is RNA.

70. An isolated nucleic acid segment of at least 15 contiguous nucleotides including a single nucleotide polymorphic site from an exon sequence selected from the group consisting of:
SEQ ID NO: 9 wherein nucleotide 69169 is replaced by A,
SEQ ID NO: 9 wherein nucleotide 27402 is replaced by G,
SEQ ID NO: 9 wherein nucleotide 27841 is replaced by C,
SEQ ID NO: 9 wherein nucleotide 35600 is replaced by G,
SEQ ID NO: 9 wherein nucleotide 45619 is replaced by A,
SEQ ID NO: 9 wherein nucleotide 46018 is replaced by G,
SEQ ID NO: 9 wherein nucleotide 46093 is replaced by G,
SEQ ID NO: 9 wherein nucleotide 46190 is replaced by G,
SEQ ID NO: 9 wherein nucleotide 50993 is replaced by C,
SEQ ID NO: 9 wherein nucleotide 51124 is replaced by T,
SEQ ID NO: 9 wherein nucleotide 55461 is replaced by T,
SEQ ID NO: 9 wherein nucleotide 63645 is replaced by A,
SEQ ID NO: 9 wherein nucleotide 63646 is replaced by C,
SEQ ID NO: 9 wherein nucleotide 24809 is replaced by G,
SEQ ID NO: 9 wherein nucleotide 27837 is replaced by C,
SEQ ID NO: 9 wherein nucleotide 31485 is replaced by T,
SEQ ID NO: 9 wherein nucleotide 31683 is replaced by G,
SEQ ID NO: 9 wherein nucleotide 24808 is replaced by G,
SEQ ID NO: 8 wherein nucleotide 31340 is replaced by C,
SEQ ID NO: 8 wherein nucleotide 32538 is replaced by G,
SEQ ID NO: 8 wherein nucleotide 13224 is replaced by G,
SEQ ID NO: 8 wherein nucleotide 21119 is replaced by A,
SEQ ID NO: 8 wherein nucleotide 30497 is replaced by A,
SEQ ID NO: 9 wherein nucleotide 24811 is replaced by C,
SEQ ID NO: 9 wherein nucleotide 68280 is replaced by A, and sequences complementary thereto.

71. The isolated nucleic acid segment of claim 70, wherein nucleotide 21119 of said exon sequence of SEQ ID NO: 8 is replaced by A.

72. The isolated nucleic acid segment of claim 70 that is DNA.

73. The isolated nucleic acid segment of claim 70 that is RNA.

74. The isolated nucleic acid segment of claim 64 or claim 70 which is a probe or a primer.

75. A method of identifying a molecule involved in bone modulation comprising identifying a molecule that binds to or that inhibits binding of a molecule to a protein involved in focal adhesion signaling.

76. The method of claim 75, wherein the molecule involved in focal adhesion signaling binds to a protein selected from the group consisting of: SEQ ID NO: 87-109.

77. The method of claim 75, wherein the molecule involved in focal adhesion signaling binds to a protein selected from the group consisting of: SEQ ID NO:90, SEQ ID NO:93, SEQ ID NO:94, SEQ ID NO:99 and SEQ ID NO: 102.

78. A method of modulating bone density in a subject by administering an agent that regulates a nucleic acid or polypeptide encoded thereby involved in focal adhesion signaling.

79. The method of claim 78, wherein the nucleic acid comprises a nucleic acid selected from the group consisting of: SEQ ID NOS: 63-86.

80. The method of claim 78, wherein the nucleic acid comprises SEQ ID NO: 66, SEQ ID NO: 71, SEQ ID NO: 77 or SEQ ID NO: 79.

81. The method of claim 78, wherein the polypeptide is selected from the group consisting of: SEQ ID NOS: 87-109.

82. The method of claim 78, wherein the polypeptide is SEQ ID NO:90, SEQ ID NO:93, SEQ ID NO:94, SEQ ID NO:99 or SEQ ID NO:102.

83. A nucleic acid comprising SEQ ID NO: 66, SEQ ID NO: 71, SEQ ID NO: 77 or SEQ ID NO: 79.

84. A nucleic acid of claim 83, wherein the nucleic acid is RNA or DNA.

85. A replicative cloning vector comprising a nucleic acid of claim 83 and a replicon operative in a host cell.

86. An isolated host cell transformed with the replicative cloning vector of claim 85.

87. An expression vector comprising the nucleic acid sequence of claim 83.

88. An isolated host cell transformed with the expression vector of claim 87.

89. A polypeptide comprising SEQ ID NO:90, SEQ ID NO:93, SEQ ID NO:94, SEQ ID NO:99 or SEQ ID NO: 102.

90. A nucleic acid encoding a polypeptide selected from the group consisting of SEQ ID NO:90, SEQ ID NO:93, SEQ ID NO:94, SEQ ID NO:99 or SEQ ID NO: 102.

91. A method of treating bone development disorders comprising the step of administering an agent which modulates a nucleic acid or a polypeptide involved in focal adhesion signaling.

92. The method of claim 91, wherein the nucleic acid modulated by the agent is selected from any one of SEQ ID NOS: 63-86.

93. The method of claim 91, wherein the polypeptide modulated by the agent is selected from any one of SEQ ID NOS: 87-109.

94. A method of testing a compound for bone modulation activity of Zmax1 or a Zmax1 mutant comprising:
(a) immobilizing a Zmax1 protein, or a Zmax1 mutant protein, or a portion of a Zmax1 protein or a portion of a Zmax1 mutant protein to a substrate;
(b) exposing a compound to said Zmax1 protein or portion thereof, or to said Zmax1 mutant protein or portion thereof;
(c) determining whether said compound bound to said Zmax1 protein or to said Zmax1 mutant protein; and
(d) administering said compound to a host and determining whether administration of said protein modulates bone mass, if said compound bound to said Zmax1 protein or said Zmax1 mutant protein.

95. The method of claim 94, wherein the compound is a protein.

96. A method for identifying proteins involved in Zmax1 signaling that modulates bone mass comprising:
(a) preparing a bait protein comprising operably linking a nucleic acid encoding Zmax1 or a biologically active portion of Zmax1 to a DNA binding domain of a yeast transcription factor;
(b) preparing a prey protein comprising operably linking a nucleic acid encoding a prety protein to a DNA binding domain of a yeast transcription factor;
(c) expressing said bait protein in a bate yeast and expressing said prety protein in a prey yeast;
(d) mixing said bait yeast and said prey yeast;
(e) determining whether the prey yeast mated to the bait yeast and given yeast mating, analyzing whether modulation of the prey protein modulates bone mass.

97. An isolated nucleic acid comprising SEQ ID NO: 1 or a biologically active fragment of SEQ ID NO: 1, wherein a nucleotide of SEQ ID NO: 1 which encodes YWTD motif is mutated and said mutation cuases an altered bone mass phenotype in a host when SEQ ID NO: 1 or said biologically active fragment of SEQ ID NO: 1 is epxressed in said host.

98. A replicative cloning vector comprising the nucleic acid of claim 97.

99. An isolated host cell transformed with the replicative cloning vector of claim 98.

100. A transgenic animal which expresses a mutated Zmax1, wherein said mutated Zmax1 produces an altered bone mass when expressed in said animal.

101. A method for treating a bone development disorder in an animal comprising transferring a nucleic acid comprising SEQ ID NO: 1 into a somatic cell of an animal suffering from said bond development disorder.

102. A method for treating a bone development disorder in an animal comprising transferring a nucleic acid comprising SEQ ID NO: 1 into a germ-line cell of an animal suffering from a bone development disorder.

103. A method of modulating bone development in a host comprising administering an amino acid sequence comprising SEQ ID NO:3 or a biologically active fragment thereof to a somatic cell of a host suffering from a bone development disorder.

104. An isolated high bone mass (HBM) polynucleotide comprising a nucleic acid selected from the group consisting of:
(a) a nucleic acid having SEQ ID NO: 2;
(b) a nucleic acid encoding a polypeptide of SEQ ID NO: 4;
(c) a nucleic acid amplified from a mammalian library using primers which hybridize to loci within the nucleic acid of SEQ ID NO: 2 or a nucleic acid encoding a polypeptide of SEQ ID NO: 4;
(d) a nucleic acid which hybridizes to the nucleic acid of SEQ ID NO: 2;
(e) a nucleic acid which is complementary to a nucleic acid of (a), (b), (c), and (d);
(f) a nucleic acid comprising at least 15 contiguous nucleotides which comprise position 582 of SEQ ID NO: 2 from a polynucleotide of (a), (b), (c), (d), and (e); and
wherein said isolated HBM polynucleotide encodes a protein or polypeptide, which when administered to a subject modulates bone mass.

105. The polynucleotide of claim 104, wherein the nucleic acid comprises at least 100 contiguous nucleotides from a polynucleotide of (a), (b), (c), (d) or (e).

106. A method for testing a substance as a therapeutic agent for bone modulation in a host comprising administering a nucleic acid comprising SEQ ID NO:1 to said host, and assessing whether bone modulation occurs in said host.

107. A method for expressing Zmax1 protein in bone tissue comprising constructing an expression vector comprising a promoter that directs expression in bone tissue operably linked a nucleic acid comprising SEQ ID NO: 1 or a nucleic acid encoding a biologically active fragment of SEQ ID NO: 1.

108. The method of claim 107, wherein the promoter is an osteocalcin promoter, a bone sialoprotein promoter of an AML-3 promoter.

109. The method of claim 108, wherein the promoter is the osteocalcin promoter and the bone tissue is osteoblasts.

110. A method of modulating bone mass in an animal comprising the step of administering a nucleic acid which is antisense to SEQ ID NO: 1 or to a portion of SEQ ID NO: 1 in an amount which modulates bone mass.

111. A method of studying bone disorders comprising preparing a transgenic animal which expresses Zmax1; regulating said Zmax1; and determining impact of said Zmax1 regulation on bone development in said mammal.

112. A transgenic animal which expresses a mutated Zmax1, wherein said mutated Zmax1 produces an altered bone mass when expressed in said animal.

113. A method of testing a compound as a bone modulating compound by administering said compound to said transgenic animal of claim 112 and determining whether said compound modulated bone mass in said animal.

114. An isolated high bone mass (HBM) polynucleotide of claim 104, wherein the nucleic acid is a nucleic acid of (a) or (b) or a nucleic acid complementary thereto.

115. An isolated nucleic acid sequence of claim 55, wherein said 15 contiguous nucleotides comprises positions 581, 582 and 583 of SEQ ID NO: 2.

116. An isolated nucleic acid sequence comprising at least 15 contiguous nucleotides of SEQ ID NO: 2, wherein said 15 contiguous nucleotides comprise nucleotides which encode for an amino acid substitution at position 171 of SEQ ID NO: 4; which substitution is associated with a high bone mass phenotype.

117. An isolated high bone mass (HBM) polynucleotide comprising a nucleic acid selected from the group consisting of:
(a) a nucleic acid having SEQ ID NO: 2;
(b) a nucleic acid encoding a polypeptide of SEQ ID NO: 4;
(c) a nucleic acid which is complementary to a nucleic acid of (a), (b); and (d) a nucleic acid comprising at least 15 contiguous nucleotides which comprise position 582 of SEQ ID NO: 2 from a polynucleotide of (a), (b), and (c).

The application's sequence listing, which the Patent Office published only in electronic form, follows.

SEQUENCE LISTING (109 sequences)

SEQ ID NO: 1 - DNA, 5120 bp, Homo sapiens
actaaagcgccgccgccgcgccatggagcccgagtgagcgcggcgcgggcccgtccggccgccggacaacatggaggcagcgccgcccgggccgccgtggccgctgctgctgctgctgctgctgctgctggcgctgtgcggctgcccggcccccgccgcggcctcgccgctcctgctatttgccaaccgccgggacgtacggctggtggacgccggcggagtcaagctggagtccaccatcgtggtcagcggcctggaggatgcggccgcagtggacttccagttttccaagggagccgtgtactggacagacgtgagcgaggaggccatcaagcagacctacctgaaccagacgggggccgccgtgcagaacgtggtcatctccggcctggtctctcccgacggcctcgcctgcgactgggtgggcaagaagctgtactggacggactcagagaccaaccgcatcgaggtggccaacctcaatggcacatcccggaaggtgctcttctggcaggaccttgaccagccgagggccatcgccttggaccccgctcacgggtacatgtactggacagactggggtgagacgccccggattgagcgggcagggatggatggcagcacccggaagatcattgtggactcggacatttactggcccaatggactgaccatcgacctggaggagcagaagctctactgggctgacgccaagctcagcttcatccaccgtgccaacctggacggctcgttccggcagaaggtggtggagggcagcctgacgcaccccttcgccctgacgctctccggggacactctgtactggacagactggcagacccgctccatccatgcctgcaacaagcgcactggggggaagaggaaggagatcctgagtgccctctactcacccatggacatccaggtgctgagccaggagcggcagcctttcttccacactcgctgtgaggaggacaatggcggctgctcccacctgtgcctgctgtccccaagcgagcctttctacacatgcgcctgccccacgggtgtgcagctgcaggacaacggcaggacgtgtaaggcaggagccgaggaggtgctgctgctggcccggcggacggacctacggaggatctcgctggacacgccggacttcaccgacatcgtgctgcaggtggacgacatccggcacgccattgccatcgactacgacccgctagagggctatgtctactggacagatgacgaggtgcgggccatccgcagggcgtacctggacgggtctggggcgcagacgctggtcaacaccgagatcaacgaccccgatggcatcgcggtcgactgggtggcccgaaacctctactggaccgacacgggcacggaccgcatcgaggtgacgcgcctcaacggcacctcccgcaagatcctggtgtcggaggacctggacgagccccgagccatcgcactgcaccccgtgatgggcctcatgtactggacagactggggagagaaccctaaaatcgagtgtgccaacttggatgggcaggagcggcgtgtgctggtcaatgcctccctcgggtggcccaacggcctggccctggacctgcaggaggggaagctctactggggagacgccaagacagacaagatcgaggtgatcaatgttgatgggacgaagaggcggaccctcctggaggacaagctcccgcacattttcgggttcacgctgctgggggacttcatctactggactgactggcagcgccgcagcatcgagcgggtgcacaaggtcaaggccagccgggacgtcatcattgaccagctgcccgacctgatggggctcaaagctgtgaatgtggccaaggtcgtcggaaccaacccgtgtgcggacaggaacggggggtgcagccacctgtgcttcttcacaccccacgcaacccggtgtggctgccccatcggcctggagctgctgagtgacatgaagacctgcatcgtgcctgaggccttcttggtcttcaccagcagagccgccatccacaggatctccctcgagaccaataacaacgacgtggccatcccgctcacgggcgtcaaggaggcctcagccctggactttgatgtgtccaacaaccacatctactggacagacgtcagcctgaagaccatcagccgcgccttcatgaacgggagctcggtggagcacgtggtggagtttggccttgactaccccgagggcatggccgttgactggatgggcaagaacctctactgggccgacactgggaccaacagaatcgaagtggcgcggctggacgggcagttccggcaagtcctcgtgtggagggacttggacaacccgaggtcgctggccctggatcccaccaagggctacatctactggaccgagtggggcggcaagccgaggatcgtgcgggccttcatggacgggaccaactgcatgacgctggtggacaaggtgggccgggccaacgacctcaccattgactacgctgaccagcgcctctactggaccgacctggacaccaacatgatcgagtcgtccaacatgctgggtcaggagcgggtcgtgattgccgacgatctcccgcacccgttcggtctgacgcagtacagcgattatatctactggacagactggaatctgcacagcattgagcgggccgacaagactagcggccggaaccgcaccctcatccagggccacctggacttcgtgatggacatcctggtgttccactcctcccgccaggatggcctcaatgactgtatgcacaacaacgggcagtgtgggcagctgtgccttgccatccccggcggccaccgctgcggctgcgcctcacactacaccctggaccccagcagccgcaactgcagcccgcccaccaccttcttgctgttcagccagaaatctgccatcagtcggatgatcccggacgaccagcacagcccggatctcatcctgcccctgcatggactgaggaacgtcaaagccatcgactatgacccactggacaagttcatctactgggtggatgggcgccagaacatcaagcgagccaaggacgacgggacccagccctttgttttgacctctctgagccaaggccaaaacccagacaggcagccccacgacctcagcatcgacatctacagccggacactgttctggacgtgcgaggccaccaataccatcaacgtccacaggctgagcggggaagccatgggggtggtgctgcgtggggaccgcgacaagcccagggccatcgtcgtcaacgcggagcgagggtacctgtacttcaccaacatgcaggaccgggcagccaagatcgaacgcgcagccctggacggcaccgagcgcgaggtcctcttcaccaccggcctcatccgccctgtggccctggtggtggacaacacactgggcaagctgttctgggtggacgcggacctgaagcgcattgagagctgtgacctgtcaggggccaaccgcctgaccctggaggacgccaacatcgtgcagcctctgggcctgaccatccttggcaagcatctctactggatcgaccgccagcagcagatgatcgagcgtgtggagaagaccaccggggacaagcggactcgcatccagggccgtgtcgcccacctcactggcatccatgcagtggaggaagtcagcctggaggagttctcagcccacccatgtgcccgtgacaatggtggctgctcccacatctgtattgccaagggtgatgggacaccacggtgctcatgcccagtccacctcgtgctcctgcagaacctgctgacctgtggagagccgcccacctgctccccggaccagtttgcatgtgccacaggggagatcgactgtatccccggggcctggcgctgtgacggctttcccgagtgcgatgaccagagcgacgaggagggctgccccgtgtgctccgccgcccagttcccctgcgcgcggggtcagtgtgtggacctgcgcctgcgctgcgacggcgaggcagactgtcaggaccgctcagacgaggtggactgtgacgccatctgcctgcccaaccagttccggtgtgcgagcggccagtgtgtcctcatcaaacagcagtgcgactccttccccgactgtatcgacggctccgacgagctcatgtgtgaaatcaccaagccgccctcagacgacagcccggcccacagcagtgccatcgggcccgtcattggcatcatcctctctctcttcgtcatgggtggtgtctattttgtgtgccagcgcgtggtgtgccagcgctatgcgggggccaacgggcccttcccgcacgagtatgtcagcgggaccccgcacgtgcccctcaatttcatagccccgggcggttcccagcatggccccttcacaggcatcgcatgcggaaagtccatgatgagctccgtgagcctgatggggggccggggcggggtgcccctctacgaccggaaccacgtcacaggggcctcgtccagcagctcgtccagcacgaaggccacgctgtacccgccgatcctgaacccgccgccctccccggccacggacccctccctgtacaacatggacatgttctactcttcaaacattccggccactgcgagaccgtacaggccctacatcattcgaggaatggcgcccccgacgacgccctgcagcaccgacgtgtgtgacagcgactacagcgccagccgctggaaggccagcaagtactacctggatttgaactcggactcagacccctatccacccccacccacgccccacagccagtacctgtcggcggaggacagctgcccgccctcgcccgccaccgagaggagctacttccatctcttcccgccccctccgtccccctgcacggactcatcctgacctcggccgggccactctggcttctctgtgcccctgtaaatagttttaaatatgaacaaagaaaaaaatatattttatgatttaaaaaataaatataattgggattttaaaaacatgagaaatgtgaactgtgatggggtgggcagggctgggagaactttgtacagtggagaaatatttataaacttaattttgtaaaaca

SEQ ID NO: 2 - DNA, 5120 bp, Homo sapiens
actaaagcgccgccgccgcgccatggagcccgagtgagcgcggcgcgggcccgtccggccgccggacaacatggaggcagcgccgcccgggccgccgtggccgctgctgctgctgctgctgctgctgctggcgctgtgcggctgcccggcccccgccgcggcctcgccgctcctgctatttgccaaccgccgggacgtacggctggtggacgccggcggagtcaagctggagtccaccatcgtggtcagcggcctggaggatgcggccgcagtggacttccagttttccaagggagccgtgtactggacagacgtgagcgaggaggccatcaagcagacctacctgaaccagacgggggccgccgtgcagaacgtggtcatctccggcctggtctctcccgacggcctcgcctgcgactgggtgggcaagaagctgtactggacggactcagagaccaaccgcatcgaggtggccaacctcaatggcacatcccggaaggtgctcttctggcaggaccttgaccagccgagggccatcgccttggaccccgctcacgggtacatgtactggacagactgggttgagacgccccggattgagcgggcagggatggatggcagcacccggaagatcattgtggactcggacatttactggcccaatggactgaccatcgacctggaggagcagaagctctactgggctgacgccaagctcagcttcatccaccgtgccaacctggacggctcgttccggcagaaggtggtggagggcagcctgacgcaccccttcgccctgacgctctccggggacactctgtactggacagactggcagacccgctccatccatgcctgcaacaagcgcactggggggaagaggaaggagatcctgagtgccctctactcacccatggacatccaggtgctgagccaggagcggcagcctttcttccacactcgctgtgaggaggacaatggcggctgctcccacctgtgcctgctgtccccaagcgagcctttctacacatgcgcctgccccacgggtgtgcagctgcaggacaacggcaggacgtgtaaggcaggagccgaggaggtgctgctgctggcccggcggacggacctacggaggatctcgctggacacgccggacttcaccgacatcgtgctgcaggtggacgacatccggcacgccattgccatcgactacgacccgctagagggctatgtctactggacagatgacgaggtgcgggccatccgcagggcgtacctggacgggtctggggcgcagacgctggtcaacaccgagatcaacgaccccgatggcatcgcggtcgactgggtggcccgaaacctctactggaccgacacgggcacggaccgcatcgaggtgacgcgcctcaacggcacctcccgcaagatcctggtgtcggaggacctggacgagccccgagccatcgcactgcaccccgtgatgggcctcatgtactggacagactggggagagaaccctaaaatcgagtgtgccaacttggatgggcaggagcggcgtgtgctggtcaatgcctccctcgggtggcccaacggcctggccctggacctgcaggaggggaagctctactggggagacgccaagacagacaagatcgaggtgatcaatgttgatgggacgaagaggcggaccctcctggaggacaagctcccgcacattttcgggttcacgctgctgggggacttcatctactggactgactggcagcgccgcagcatcgagcgggtgcacaaggtcaaggccagccgggacgtcatcattgaccagctgcccgacctgatggggctcaaagctgtgaatgtggccaaggtcgtcggaaccaacccgtgtgcggacaggaacggggggtgcagccacctgtgcttcttcacaccccacgcaacccggtgtggctgccccatcggcctggagctgctgagtgacatgaagacctgcatcgtgcctgaggccttcttggtcttcaccagcagagccgccatccacaggatctccctcgagaccaataacaacgacgtggccatcccgctcacgggcgtcaaggaggcctcagccctggactttgatgtgtccaacaaccacatctactggacagacgtcagcctgaagaccatcagccgcgccttcatgaacgggagctcggtggagcacgtggtggagtttggccttgactaccccgagggcatggccgttgactggatgggcaagaacctctactgggccgacactgggaccaacagaatcgaagtggcgcggctggacgggcagttccggcaagtcctcgtgtggagggacttggacaacccgaggtcgctggccctggatcccaccaagggctacatctactggaccgagtggggcggcaagccgaggatcgtgcgggccttcatggacgggaccaactgcatgacgctggtggacaaggtgggccgggccaacgacctcaccattgactacgctgaccagcgcctctactggaccgacctggacaccaacatgatcgagtcgtccaacatgctgggtcaggagcgggtcgtgattgccgacgatctcccgcacccgttcggtctgacgcagtacagcgattatatctactggacagactggaatctgcacagcattgagcgggccgacaagactagcggccggaaccgcaccctcatccagggccacctggacttcgtgatggacatcctggtgttccactcctcccgccaggatggcctcaatgactgtatgcacaacaacgggcagtgtgggcagctgtgccttgccatccccggcggccaccgctgcggctgcgcctcacactacaccctggaccccagcagccgcaactgcagcccgcccaccaccttcttgctgttcagccagaaatctgccatcagtcggatgatcccggacgaccagcacagcccggatctcatcctgcccctgcatggactgaggaacgtcaaagccatcgactatgacccactggacaagttcatctactgggtggatgggcgccagaacatcaagcgagccaaggacgacgggacccagccctttgttttgacctctctgagccaaggccaaaacccagacaggcagccccacgacctcagcatcgacatctacagccggacactgttctggacgtgcgaggccaccaataccatcaacgtccacaggctgagcggggaagccatgggggtggtgctgcgtggggaccgcgacaagcccagggccatcgtcgtcaacgcggagcgagggtacctgtacttcaccaacatgcaggaccgggcagccaagatcgaacgcgcagccctggacggcaccgagcgcgaggtcctcttcaccaccggcctcatccgccctgtggccctggtggtggacaacacactgggcaagctgttctgggtggacgcggacctgaagcgcattgagagctgtgacctgtcaggggccaaccgcctgaccctggaggacgccaacatcgtgcagcctctgggcctgaccatccttggcaagcatctctactggatcgaccgccagcagcagatgatcgagcgtgtggagaagaccaccggggacaagcggactcgcatccagggccgtgtcgcccacctcactggcatccatgcagtggaggaagtcagcctggaggagttctcagcccacccatgtgcccgtgacaatggtggctgctcccacatctgtattgccaagggtgatgggacaccacggtgctcatgcccagtccacctcgtgctcctgcagaacctgctgacctgtggagagccgcccacctgctccccggaccagtttgcatgtgccacaggggagatcgactgtatccccggggcctggcgctgtgacggctttcccgagtgcgatgaccagagcgacgaggagggctgccccgtgtgctccgccgcccagttcccctgcgcgcggggtcagtgtgtggacctgcgcctgcgctgcgacggcgaggcagactgtcaggaccgctcagacgaggtggactgtgacgccatctgcctgcccaaccagttccggtgtgcgagcggccagtgtgtcctcatcaaacagcagtgcgactccttccccgactgtatcgacggctccgacgagctcatgtgtgaaatcaccaagccgccctcagacgacagcccggcccacagcagtgccatcgggcccgtcattggcatcatcctctctctcttcgtcatgggtggtgtctattttgtgtgccagcgcgtggtgtgccagcgctatgcgggggccaacgggcccttcccgcacgagtatgtcagcgggaccccgcacgtgcccctcaatttcatagccccgggcggttcccagcatggccccttcacaggcatcgcatgcggaaagtccatgatgagctccgtgagcctgatggggggccggggcggggtgcccctctacgaccggaaccacgtcacaggggcctcgtccagcagctcgtccagcacgaaggccacgctgtacccgccgatcctgaacccgccgccctccccggccacggacccctccctgtacaacatggacatgttctactcttcaaacattccggccactgcgagaccgtacaggccctacatcattcgaggaatggcgcccccgacgacgccctgcagcaccgacgtgtgtgacagcgactacagcgccagccgctggaaggccagcaagtactacctggatttgaactcggactcagacccctatccacccccacccacgccccacagccagtacctgtcggcggaggacagctgcccgccctcgcccgccaccgagaggagctacttccatctcttcccgccccctccgtccccctgcacggactcatcctgacctcggccgggccactctggcttctctgtgcccctgtaaatagttttaaatatgaacaaagaaaaaaatatattttatgatttaaaaaataaatataattgggattttaaaaacatgagaaatgtgaactgtgatggggtgggcagggctgggagaactttgtacagtggagaaatatttataaacttaattttgtaaaaca

SEQ ID NO: 3 - protein, 1615 aa, Homo sapiens
MEAAPPGPPWPLLLLLLLLLALCGCPAPAAASPLLLFANRRDVRLVDAGGVKLESTIVVSGLEDAAAVDFQFSKGAVYWTDVSEEAIKQTYLNQTGAAVQNVVISGLVSPDGLACDWVGKKLYWTDSETNRIEVANLNGTSRKVLFWQDLDQPKAIALDPAHGYMYWTDWGETPRIERAGMDGSTRKIIVDSDIYWPNGLTIDLEEQKLYWADAKLSFIHRANLDGSFRQKVVEGSLTHPFALTLSGDTLYWTDWQTRSIHACNKRTGGKRKEILSALYSPMDIQVLSQERQPFFHTRCEEDNGGWSHLCLLSPSEPFYTCACPTGVQMQDNGRTCKAGAEEVLLLARRTDLRRISLDTPDFTDIVLQVDDIRHAIAIDYDPLEGYVYWTDDEVRAIRRAYLDGSGAQTLVNTEINDPDGIAVDWVARNLYWTDTGTDRIEVTRLNGTSRKILVSEDLDEPRAIALHPVMGLMYWTDWGENPKIECANLDGQERRVLVNASLGWPNGLALDLQEGKLYWGDAKTDKIEVINVDGTKRRTLLEDKLPHIFGFTLLGDFIYWTDWQRRSIERVHKVKASRDVIIDQLPDLMGLKAVNVAKVVGTNPCADRNGGCSHLCFFTPHATRCGCPIGLELLSDMKTCIVPEAFLVFTSRAAIHRISLETNNNDVAIPLTGVKEASALDFDVSNNHIYWTDVSLKNISRAFMNGSSVEHVVEFGLDYPEGMAVDWMGKNLYWADTGTNRIEVARLDGQFRQVLVWRDLDNPRSLALDPTKGYIYWTEWGGKPRIVRAFMDGTNCMTLVDKVGRANDLTIDYADQRLYWTDLDTNMIESSNMLGQERVVIADDLPHPFGLTQYSDYIYWTDWNLHSIERADKTSGRNRTLIQGHLDFVMDILVFHSSRQDGLNDCMHNNGQCGQLCLAIPGGHRCGCASHYTLDPSSRNCSPPTTFLLFSQKSAISRMIPDDQHSPDLILPLHGLRNVKAIDYDPLDKFIYWVDGRQNIKRAKDDGTQPFVLTSLSQGQNPDRQPHDLSIDIYSRTLFWTCEATNTINVHRLSGEAMGVVLRGDRDKPRAIVVNAERGYLYFTNMQDRAAKIERAALDGTEREVLFTTGLIRPVALVVDNTLGKLFWVDADLKRIESCDLSGANRLTLEDANIVQPLGLTILGKHLYWIDRQQQMIERVEKTTGDKRTRIQGRVAHLTGIHAVEEVSLEEFSAHPCARDNGGCSHICIAKGDGTPRCSCPVHLVLLQNLLTCGEPPTCSPDQFACATGEIDCIPGAWRCDGFPECDDQSDEEGCPVCSAAQFPCARGQCVDLRLRCDGEADCQDRSDEVDCDAICLPNQFRCASGQCVLIKQQCDSFPDCIDGSDELMCEITKPPSDDSPAHSSAIGPVIGIILSLFVMGGVYFVCQRVVCQRYAGANGPFPHEYVSGTPHVPLNFIAPGGSQHGPFTGIACGKSMMSSVSLMGGRGGVPLYDRNHVTGASSSSSSSTKATLYPPILNPPPSPATDPSLYNMDMFYSSNIPATARPYRPYIIRGMAPPTTPCSTDVCDSDYSASRWKASKYYLDLNSDSDPYPPPPTPHSQYLSAEDSCPPSPATERSYFHLFPPPPSPCTDSS

SEQ ID NO: 4 - protein, 1615 aa, Homo sapiens
MEAAPPGPPWPLLLLLLLLLALCGCPAPAAASPLLLFANRRDVRLVDAGGVKLESTIVVSGLEDAAAVDFQFSKGAVYWTDVSEEAIKQTYLNQTGAAVQNVVISGLVSPDGLACDWVGKKLYWTDSETNRIEVANLNGTSRKVLFWQDLDQPKAIALDPAHGYMYWTDWVETPRIERAGMDGSTRKIIVDSDIYWPNGLTIDLEEQKLYWADAKLSFIHRANLDGSFRQKVVEGSLTHPFALTLSGDTLYWTDWQTRSIHACNKRTGGKRKEILSALYSPMDIQVLSQERQPFFHTRCEEDNGGWSHLCLLSPSEPFYTCACPTGVQMQDNGRTCKAGAEEVLLLARRTDLRRISLDTPDFTDIVLQVDDIRHAIAIDYDPLEGYVYWTDDEVRAIRRAYLDGSGAQTLVNTEINDPDGIAVDWVARNLYWTDTGTDRIEVTRLNGTSRKILVSEDLDEPRAIALHPVMGLMYWTDWGENPKIECANLDGQERRVLVNASLGWPNGLALDLQEGKLYWGDAKTDKIEVINVDGTKRRTLLEDKLPHIFGFTLLGDFIYWTDWQRRSIERVHKVKASRDVIIDQLPDLMGLKAVNVAKVVGTNPCADRNGGCSHLCFFTPHATRCGCPIGLELLSDMKTCIVPEAFLVFTSRAAIHRISLETNNNDVAIPLTGVKEASALDFDVSNNHIYWTDVSLKNISRAFMNGSSVEHVVEFGLDYPEGMAVDWMGKNLYWADTGTNRIEVARLDGQFRQVLVWRDLDNPRSLALDPTKGYIYWTEWGGKPRIVRAFMDGTNCMTLVDKVGRANDLTIDYADQRLYWTDLDTNMIESSNMLGQERVVIADDLPHPFGLTQYSDYIYWTDWNLHSIERADKTSGRNRTLIQGHLDFVMDILVFHSSRQDGLNDCMHNNGQCGQLCLAIPGGHRCGCASHYTLDPSSRNCSPPTTFLLFSQKSAISRMIPDDQHSPDLILPLHGLRNVKAIDYDPLDKFIYWVDGRQNIKRAKDDGTQPFVLTSLSQGQNPDRQPHDLSIDIYSRTLFWTCEATNTINVHRLSGEAMGVVLRGDRDKPRAIVVNAERGYLYFTNMQDRAAKIERAALDGTEREVLFTTGLIRPVALVVDNTLGKLFWVDADLKRIESCDLSGANRLTLEDANIVQPLGLTILGKHLYWIDRQQQMIERVEKTTGDKRTRIQGRVAHLTGIHAVEEVSLEEFSAHPCARDNGGCSHICIAKGDGTPRCSCPVHLVLLQNLLTCGEPPTCSPDQFACATGEIDCIPGAWRCDGFPECDDQSDEEGCPVCSAAQFPCARGQCVDLRLRCDGEADCQDRSDEVDCDAICLPNQFRCASGQCVLIKQQCDSFPDCIDGSDELMCEITKPPSDDSPAHSSAIGPVIGIILSLFVMGGVYFVCQRVVCQRYAGANGPFPHEYVSGTPHVPLNFIAPGGSQHGPFTGIACGKSMMSSVSLMGGRGGVPLYDRNHVTGASSSSSSSTKATLYPPILNPPPSPATDPSLYNMDMFYSSNIPATARPYRPYIIRGMAPPTTPCSTDVCDSDYSASRWKASKYYLDLNSDSDPYPPPPTPHSQYLSAEDSCPPSPATERSYFHLFPPPPSPCTDSS

SEQ ID NO: 5 - DNA, 3096 bp, Homo sapiens
catcttctcacacgatctctcgcttcgcactccttcctttgattggttttcaccatttactcagacgacggtccttcttcgatctttgcacattcttctatcatctactaccttcatacccagctccgtcccctaatattcatgcgcggatggcccattccgtggtgaaaattcccttctactctgctaatctgctgttctctctccctcccgtcgggttctgctcctgccacgttctcccctctccccaccaaaggctgggttttctttgtcagggctcctttcccctttggaagaaggggggctgtatggccttggtgcgaggccctccagtgacaggatcccccatcacccagagttccacaggccctggtagggaggagggggagcagaagaggaggtgccatctttgcctgctggggaagggcaggggccacccacacagagctctcccatttgctgtggaccctggggccactgcccagttccttccaaaggaaagccagctccccaggtggtgggagagtgatatggcttcctcttaaacttagggaattgagtgtgtggttgcttctaagtgccttagaagccgggagcggctcctggaaagagcctgcctgccacagcgggccttaccctggctgtgcccacagatgtccctggggcctgccgctcctgcccggctctcctggcctcccccggtgtgggttgggaaaagcacagcaaattaaaaaacacctccatctctggcctttgaagaatgcatctgaacagccgagagtgtaaaccgtggtgaaatgtggtctttccagtttggggagaagcagggcagagctggggcttttgtacccagggtttccaagagctcctgcctccctcggctgggctggccagggccccccgctgggacctccagctgtaatagggaaggttttactgggttgctggccactgtggactgcccctaagggcaggtatgcctgcctttacccgggttcccctcctgcctggaagatacagcccatgggaggcctgttgtctgtgggatcctccagcatcagagacactggggccagcgtctgcctggtgaggtgcaggcctggcaggcccggtcccccacctgcttgagcacccacggtggtgggggctcgctgcctcccgagacaatctatgtcattgttgtccaaggaagctaatttagagtagaaagttccgtgtccagtcccactctgtgcgtgtgttagcaggggactctcgggccggagctgggtccaccctggtagggggacttcatggggcctgggcgacagcactgtgtatttgtgtgtgtgtgtgtttgtgtgtgtgtgtgtctgaggaggtggaccagtttctcaaaaggcctgtgaccccaagaaccaaggaatttcagcctgggtggatcacaccttcactggtgagtgggacaagctgggggccctcgccacaggagcagccagggcatggggcacagttggcctcattcacaaaatgggagtataagtgatccctgctctggcggccaggacgatgagtgggaacacaccgtgtgggggctgcctggcctgggtgtgccgcgggtgtccttgttggtgatggttccacctgcttgtgccaccagtgccctctgggtctcacacacaactctcttcccagcgaaggcccctcctgccctcaggcctcagtgctgcttccgtctcggaaggccccaggagctcctgcatcctgggcgtgattcctgtgtgcctgcagaccccctcgcggctgccatctcatcctttggtgcacctgttggccagacctcctggtagcgggtgctgcactcccctgaatgtgccggggcctgggggcagggacctgggctcctccctcactgagtggagggaactcagtgtcttggagttggggtgcctgcaggctgggtggtgcaggtgaaatgcagacctctcagctggtgttccagagcagctgccttcccccgcccgagggacttcacccgcagcccagtcaggggtggcgcctgggtgcatcgcccgcaggctgggtaggggtggagcctgggtggccctgcctgtgagctgcatagttgtcgcctttgaccctgagttttcttcgttatctgtttggacctgtttggggcaggcaggggatgagatctgaagataaatgccttagctgtgaccatctccttttgtgagaggtcaatgtccagttccgctgcagttataacatcccattttttgatttctttttattttttcctttttctttttgagatggagtctcgctctgtcacccaggctggagtgcaatggggtgacctcagctcactgcaacctccacttctcgggttcaagtgattctcctgcctcagcctcctgactagcaggggttacaggcgtgagccaccacgcccagctaatttttgtatttttagtagaggcaaggtttcgtcatgttggccaggctggtctcaaactcctggccttaagtgatctgcccgcctcggcctcccaaagtgctgagatgacaggtgtgagccaccgtgcccggcccagaactctttaattcccacctgaaacttgccgccttaagcaggtccccagtctccctcccctagtccctggtcccaccattctgctttctgtctcaatgaatttgcctaccgtaagtacctcatataaattgaatcataaagtatttgtctttttatatctggcttatttcacttagcataacattcttaagtttcatccatgttgtagcatgtgtcagaatctctctctttttttttttttttttttttttttttttttgcagacagagtctcgctctgtcatctagactggagttcagtggcacgatctcggttcactgcaacatctgcctcctgggtccaagcaattctcctgcctcagcctccttagcagctggaactacaggcgcgtgccaccatgccttgctaatttttgtatttttatgtggaggcagggtttcaccatcttggccaggctggtctcgaattcctggtcttcaccacgggggcccgaaggacccgggcaaagcgtggaggggagg

SEQ ID NO: 6 - DNA, 26928 bp, Homo sapiens
  unsure (12044),(12489),(26433),(26434),(26435),(26436),(26439),(26441): Identity of nucleotide sequences at the above locations are unknown.
gaagaccaagggcacacagcgaggcagtttcagggcgggcagcctggggccccacggggcggccccggacacttgttctcacctgtggagggcagagaagggaacagggagagaagtggccggctgggagtggaggtgggtttgaggttttactgtaaactaaatgtgtaccctctaccttagttatgaattatgagacacgaagactgcgaaacagacacactcctctaaaagtgcctctaggctgacagggagaaagtcccgccaggctcccagacgccacctttgagtccttcaacaagcccgccagggcctcttgcccaccggtgtcagctcagccactgaaccctccaggaagaagacgtgctggtaggagaagaatctcacccaggcacagcctggaaggggcacagaaggggctccggaaccagcaagcccaagttggaactcccagtctgctactttctagaacgactgtgcccttggcgggtctaagtagaacctctccgcgcactctttcctcctttgtaaagtggggacagcaatggccaccttgcaggttcagagagggcttgcagtacctcacagaactgagtgcccgtgaacgtgtgtgttcctccagatttgtgacagctttgccaggctggagtcaggctgaacgcctctgccctcatggggtttatattctaggaagaccaacaaaaacaagaagacggaaaattaaaacaacaaaagccccattgacaggccgtgaagaatgccatgaaaaatgaatggcgttgtgctgcagtctttggggaaacgggcttacggaaagaaggacacttgagctgctaccaatgagcagccgtccggtgggagggcagttcaggaagagcagacatccactgaggaggcgctggggcagagggcagcctggtcgctggattcgggggaggaaccacatcaggccatgagctggagctggtggtagaatgtacaggagaggccagccagggccagctcatgtcagacctcaagcggggaagatgaatcgagaatgcaccccacgagcaatgggaagccagtctacgatttaagcagcaaaaatattttcccttcttccaccctgcatccagctctaccagcacagcctggggttctattttcaagatagaatagacccagactcccagctcttcttacacttctactactgccacctgtcacccactcatgcgtccccacttgcagcctcgacccccttccacctgatctcatggcagccagggaagctccagggctcgtgagggctgccatctcaggaaagaagcaaaagccttcggcacctgcagggcctgctccaaccacacttcttccttgacctctcagcttccttagccactcccttcccacatctcaccctgctccagccacagtggtgtctctgtgggttctcaaacacaccaggtgcactcctgcctcagggcctttgtgcttgctgttctctgctgggactcttttttttttttttttttttgagacagggtctcactctgtggcccaggctggagtgtagtggtgtgatcgtagctcattgcaacctcaaactcctgggctcaagcaatcctcccacctcagcctctcaagtagttagcttttgttgttttgttttgagatgggatctcactctgttgcccaggctggagtgcagtggggcaatcttggctcaccacaacctctgcctcccaggctcaagcaattctcctgcctcagcctcccaagtagctgggattacaggcatgtgccaccacgcccagcttatttttgtatttttagtagagacagggtttcaccatgttggtctggctggtcttgaactcctggcctcagatgatccacctgcctcggcctcccaaagtgctgggatgacaggcatgagcctgtctctagtagttaggactacagagaggggccatcatgcctggtgatcctcccaccttttctgctccaactctttcaccccacttagcctcgtggctcactctcttacctcttcagctcctcagtcaggcctgaggacccctgttgaaaattgcaaaccacaccccccaccaccaccacccactattgccagcactttctactccatttctctgctttacttttctcctttgtactcatcaccacctgactcattacatgtttacgtatctttcttctctccactagcatggaagctccaggagagcagagagtgtagttttattccctgatgtgtttcctgtgcccgtaccagggcctagcacacagtaggtgctcagtaaatgtgtgttggatgaacaaatacagtgaaaggatctgatctacatttataaagaaggcactctggctgctgagtggggatgagactgtcaggaggaaagaggcccctgtgggggcctggccagcaggtgggtacaatggtagcagccaggagagagggcctcttggactcaagtggatggggcctgctcagggctccggccacaggaacaaagggaagggggcccaggatggcctgtcatagaggacacattacaactggcccaaagttcaagtcaggtttctaaatttgggaagggatacagaaaaactaaagactctactggacagtcagttattgaaatgattacatagaaaatgtaccaagaattaaaaaaaaaaaaaaaaagcattatgaaggggccaccagagactcccagagaggaaagggactatgggctggatgcggtgactcacacctataatcccagcactttgggaggccgaggagggtggatcacgaggtcaggagttcaaaaccagcctaggcaacatggtaaaacccccgtttctactaaaaatacaaaaaattagctgggcatggcagcatgtgcctgtaatcccagctactcgggaggctgaggcaggagagttgctagaacccaggaggcagaggttgcagtgagccgagattgagccactatgctccagcttgggcgacagagcaagactccgtctctaaaaaaaagaaaaaaaaggccagatgaggtggctcatgcctgtaatcccagcactttgggaggccgaggtgggtggatcacgaggtcaggagatcgagaccatcctggctaacatggtgaaactccatctctacttaaaatacaaaaaattagccgggcgtggtggcgggcacctgtagtcccagctacttgggaggctgaggcaggagaatggcgtgaacctgggaggcggagcttgcagtgagccgagattgcgccactgcactccatccagcctgggcgacagagttagactccgtctcaaaaaaaaaaaaaaaaaaaaaattagctgattagttgggcttggtggcgggcgcctgtaatcccaactactcgggaggctgaggcgggagaatcacttgaacccgggaggcagaggttgcaatgagccgatatcacgccactacactccagcctgggcgacagagcaagactccatctcaaaaaagaaaaaaaaaaagaaaggggctgtgctgtggcctgggacccaaagcacactactgcaaggtcccagggtgcctgactccaaccggagccttgagaacattcatttgcaaagaatgaattaaaattcagcactattttattctgcaggattccagcaccccaaggacagtcatttttagacccttcagtaacgtaataagtaaccggaggatgtgctgagcttccacttccccagacggttgcctgtcacagctcatcaggccaacaaacttttcttaggcctcaaatttggaaatgttcactctcagttcgttccttagatgcaagtccatcccaatgaagtaacaggggctcagcacctgtccaatctcattgcttccggggacaggggcccatgaggatgtcgtttcagcccggtgacacttgggcaaagtgccttttggtttccctcccaggctggaacgtgctggctctgtgaagttacgctgggcacaagagccccccccaacccggcaggactgactgctgtggtcagaggcgcccctggggctttgggagccacagaatcttcctgagggcagcgccggaggaggccccagtgagagtgcccactgccaggctcattcctcaggctgccgcaggcctctccccaaaacaggcaatgcttctcagcaacctgccccaggagcaggccagggaaggccgccatcggcctacagtgctgggctctggagggcttggttggtaacaggccatggtttctatgagccagctggggtgtgaaggacacaggctggattcacctctctgggcctcagtttctgcattcaaaaagtgggaatcatgatatctgctctatttcttatctctcagtgctgatgtgaacctccaataagacttttaaaaatactctttctaccttacttttatttttcatttattttaagataatgtctagctgtctcacccaggctggagtgcagtggtgtgattacggctcactacagccttaacctcccaggctcaagtgatcctcctaccacagcctcccaagtagctggaactacaggcatgcaccaccgcacctggataattttttcttttgagacaaggtttcactctgttgcccaggctggagtgcagtggtgcactcttggctcactgcagcctcaacctccctgggcttaggtgatcctcacacttcagtctcccaagtagctgggactacaggtatgtgccagtacacccagctaatatttttgaaggatggggtttcactatattgcccaggctggtcttgaactccagggtttaagcaatctaccttcctcagcctgccaaagtgctaggattataggtatgagccaccccccggcctataatcctaccactttaaaaaagcctgtaattttagcactttaaaaaatttttctaaattttttatagagatgggggacagctgtggtctcactgtgttgcccaggctggtcttgaactcctaggatcaagccatcctcctggcctggcctcccaaagtgttgggattataagcataagccttaccttaccttttttttttgagttgcagttttgttcttgttgctcaggctggagtgcaatggcaagatcttggctcactgcaacctccacctcccgggttcaagcaattctcctgcctcagcctcccgagtagctgggattacaggcatgcgccaccacacccagctaattttgtatttttagtagagatggggtttctctatataccttaattttaaagcactgcattcatgtaaattgtgattaacatggattcaagagagggagtgaggatgaatgagccaggcagtcacctcggctgtcaccctccacttctctcctccttctgacagtcatcgtccatccgtttctgcagctgtttgtttgactctcctgatcattttgcttgccacataacttgcctcctgggaaagaatgccctgggcaggcccacatgagtagtgaaaaataatctgcagtgaaaaataaaactaagtagtctggtccacagagcagtcttattttttcactgcagatgaaggagttgacattcaggcttcattctcatttataagtgttttaaagacacatacagtggattgaacagtggccttcaaaaagatgtatctacatcctaatccctgggacctgtgaatgttaaccaagttaggaaaagggtcttcccgggtgtcattaagttagagatcttgagatgaggagctcatcgtggattatccaggtggaccctgcatccaaggacaaatggtccttagaaaagaaaagcagaggctgggcacagtggctcaagcctgtaatcccagcactttgagaggccgaggtgggtggatcacctaaggtcatgagttcgagagcagcctggccaacatgatgaaatcccatctctactaaaaatacaaaaattagcaaggcatggtggcgggtgcctataatcccagctactcaggaagctgaggcaggagaatggcttgcacctgggaggcggaggttgcagtgagccaagatcgcgccactgcactccagcctgagggagaaaagtgaaactctgtctcataaaagaaaagaaaagcagacagagatctgagacagaagaggagagtgaaggaaaaaaggccatgtgaagatgaggcagaggttggagccatgcagccacaagccaaggaatacctggagccccagaagttgcaagaggtaggaagaagcctcccctagagcctccagacggagcacagccctgccaacacctccacctcagacttctggcctccagcactgtgagataatcaactgctgttgttttaagccaccagatttgtggtaatttgttatggcagccacaggaaactaatacagtacctaatcttcacaaacccatcttacagaaaaggaaactgaagtcagagaggtagtggcttgtgcagtgtgttaggccattcttgtattactataaagaaatacctgaggccgggcatggtggctcacgcctgtaatcccagcactttgggaggccaaggtgagtggatcacttgaggtcaggagttcaagaccagcctggacaacatggtgaaaccccatttctactgaaaatatgaaaattagccaggcatggtggcgtgcatctgtagtcccagctactcaggaggctgaggcaggagaatcacttgcgcccgggaggaggaggttgtagtgagccaagattgtgccactgcactccagcctgggagacaagagagaaaccctgtctcaaaataaataaaaaacaaataaacacctgagactgggtagtttataaagaaaggggttaactggctcccggttctgcaggctgtacaagcatggtgccggcatctgcttggttgctgggaaggcttcagggagttttactcatcgtggaaggcagagccagagcaggtgcatcacacagcaaaagcaggagcgagagagagagagagcagggaggtgtgcacacttttaaatgagcagatctcacgagaactcaccattgcaaggacagcaccaagccacgaggggtctgcccccatgacccaaacctcccactaggccccacccccaacattgggaattacagttcaacatgaggtttggggggacaaatatccaaactatatcattccacccctggccccccagatctcatgttcttctcacattgcaaaatatagtcatgccttcccagtagccccccaaagtcttaactcatcccagcattaactcaaaaatcccattcccaagtccaacgtctcatctgaagatgagttcctttcacctacaagactgtaaaaatgaaaacagttatttactgctgagatacaatgggggcataggcattaggtaaacattcctgttccaaaagggagaaatcggtcaaaagaaaggggctataggccccaagcaagtccaaaacccagcagagcaatcattcaatcttaaagctccaaaataacctccttaaactccatgtcccatagccagggcacactggtgcaaggggcaggctcccaaggccttgggcagctctattcctgcggctttgcagaattcagtccccatggctgctcttacagattggagatgagggcctgcggcttttccaggtgcagggtgcaagctgctggtgatctaccattctggggtgtggatggtggcggccccgtcccgcagctccactaggcattgtcccagtggggactctatgtggggcctccaaccccacatttcccctccaatgggaaggctctgcccctgcagcagccttcttcctgggctcccaggctttctcatacatcctctgacatctaggtggatggtgtcaagcttccttcactcttgcactctgcacacctacaggcttaacaccacatggaagctgccaaggtgtatggctggaaccctctgaagcagcagcctgagctgtgactatggccctttgagccaaggctggagctggaacagtctagatgcaggcagggagcagtgtcctgaggctgtgcagagcagcagggccctgtgcctggacaatgaaaccattctttcctcctcatcctctgggcctgtgatgggagggttgtggaagatctctgaaatgcctttgaggcctttttgcctctgaggcctatttcctattgtctcagttattggcagtcggctcctttttagttatgcaaatcctctagcaagaggttactccactgccggcttgaactcctctcctgaaaaagctttttctttctttgtcacatggccaggctgcaaattttccaaacttttatgctctgttttacctttaaatataacttctaactttaattcatttatttgctcctgcatttgagcatagggaattcaaagaagctgggccacatcttgaatgctttgctgcttcaaaatttatggccacgcttggtggctcacacctgtaatcccagcactttgggaggcctaggtgggcagatcacgagatcaggagatcgagaccatcctggtcaacatggtgaaacccatctctactaaaaatacaaaaaaattagcttggtgtggtggcgcagacctgtagtcccagctactggagaggctgaggcaggagaattacttgaacctgggaggcagaggttgcagtgagcccagatcatgccactgcactccagcctggtgacagaataagatttgatctcgaaaggaaggaaggaaggaggaagggaagaaatgtcttccccccagatgtcctgggtcatccctcttatgttcaaacttcaacagatccctagggcatgaaaataatacagccaaattatttgctaaggcataacgaaagtgacctttgctccagttcccaataagttcctcatttccatctgagactcatcaccctggccttggcttgtccatatcactgtcagcattttggtcacaatcatttaaccagctaatcgggaggctgaggcaagaggatcacttgaacccaggaggttgaggctgcagtgagctgtgatcacatcactgcagtccagcttgggcaacagagcaagatcctgtctcaataaataaataaataaatacataaataacttaagtttatttaaagctgcatctttgccaccatggagaaaggccaggccagctccttctctctttctgcacgtgttcctcccacctcagctgcctctgctcctcaaggaggaacagagggagtaggaaaggccatcccaggaggcccagcaccccatgacctggctctggggccttgtgggtttatggattcccagtgctgagtcatccctcacaggctcttgtgggcaccttggacattggtcagaagcatgtggtccccgggaacacaccttttcctgatcatctgggaagggcagcttgtgccagcgaggccacctgttcagcgccacggcccgccagacagctgcagccacagccttgcctttgatcagagcaaacaccagacatgtgtgtcatgcccccaacccatctccaggggacacatgtcctttcttgccaggcctgagatgaacaagagagggacaagtccccaagcctctctctccttcctgcctcacccactccgctgttagattctcaaggtggatggtgggctaactagggcaaccgaccatcctggtttacctagaactgagggggcattttcaggaataaaactgcaaaagtctggagcaaacaggagcaagttggtcactctggggctggtggagtcaggtttccttctgcaggccccctccccgcaagcatgggtggaacccaggacaggaacacagagcaggccccaggaccgggcttgtcacttacaagtcttttttttttttttttttttgagatggagtcttgctctgtcatcagggctggagtacagtggtgccatcttagctcactgcaacctctgccttctgggttcaagtgatccccctgcctcagcctcctgagtagctgggactacaggtggcaccaccacgcccagctaattttttgtatttctagtagagatgagatggccaggctggtcttgaactcctgacctcaagtgatctgcccgccttggcctcccaaagtgctgggattacaggtgtgagccactgtgcctggccccactcacaagtcttaaaccatgcctcagcacatcaatgccatttacaaaaaggtagagggattttccaggcaaaaatagatgaaagacataggatgattgatcatgtcctgcttaaacataggtctgatgctattaagaattgagggctgggagcggtggctcacgcctgtaatcccagcactttgggaggccgaggcgggcggatcacgaggtcaggagatcgagaccatcctggctaacacggtgaaaccccatctctactaaaaatacaaaaaatggccgcgcgcggtgactcacgcctgtaatcccagcactttgggaggccaaggcgggcggatcacgaggtcaggagatcgagaccatcctggctaacacagtgaagccccgtctctactaaaaaatacaaaaaaaattagccaggcatggtggcgggcgcctgtagtcccagcaacttgggaggctgaggcaggagaagaatggtgtgaacctgggaggtggagcttccagtgagccgagatcacaccactgcactccagcctgggcgacagagtgaaactccatctcaaaaaaaaaataaataaataaataagaattgttagtattttgcaggtgtgacaaatgattctgtttctgtggcagaatgttctcaggagatctcttttgaactctcatggaaagcatcatgctgttggcaacatcacatttatttttatttatttattattttttagagacagggtcttgctctgttgcccaggctggagtgcagtggcacaatcacagctcactgcagcctcaacctcctgggctcaagcaatcctcctgcctcagcctcccaaagtagctgggaccacaggcgtgagccactgcactcagcccaatgtaccttcaatatttacatttctggcaaaggtagcaaaaccttaacaaattttgaatctagataataaaattatgaggctgggtgcagtggccctgacagggatggctcacatctgtaatctcaacattttgggaggccaaggtaggcggatcacctgaggccaggagtttgagaccagcctggccaacatggtgtaaccctgtctctaacaaaaatacaaaaaaattagccagacgtggtggtgcacgtctgtcatcccagctactagggaggctgaggcaggagaattgcttgaacccgagaggcagaggttgtgatgagccgagatcgcgtcattgcactccagcctgggcaaaagcaagagcgaaactctctctccaaaaaataaaaaaaaaataaattaatgaattaattaaaataaaataaaataatggatagtcactgtaaagaaaaaataaatgtatatatcagccaacaagtgatggaatagagcaccccatctccctggctggacagatacatcccacaacacctggaaggcggctccatgtagaactttctggactgcttgaggtgctgtgctggagcacggtgacagaggagctggaccatggacctcccccggcccccaccaagggcgaggtccccctgtggtgggtctgagggaggcatccgtatggcctctgcggcttgggcagggaatttggggtccaagtacttggtgcaaagcctggaaagagggtttgggtgctgagggcatatcccctgggccacatgggggcagaagtggggccccctgaagcttggagtcctgggcaggggcatctattttgctgtctgaggccttcagtacttgaagcaaaatggaggcagaatgtcccaccttaatgcccctgattcctccaaaccaattccagagacagcaagggccagaacagggatggccctgcccagggtcatgcancgaggaagtggccaggctgggatctgaacccaggctaatcccctcccttgtcctcctccaggccctcacccctgcatagagccctccagctcactcatcctcggccagctccatctcctcagcttgtaaacccccccgggattttcctttcttaaaaaacaaaggcttggccaggcacggtggctcacgcctgtactttgggggtggctcccagcactttgggaggccaaggtgggcggatcatgaggtcaagagattgagaccattctggccagcatggtgaaaccctgtatttactaaaaaaaaaaaaattaactgggcatggtggctagctacttaggaggctgaggcaggagaatcgcttgaacctgggagaaagaggttgcagtgagccaagatcgcgccactccactttaacctggcaacagaacaagattccgtttcnaaaaacaaacaaacaaacaaataaacaaaaaaaggcggagcgcgatggctcgcgcctgcaatcccagcactttgggaggctgaggcgggcggatcacttgaggttaggagtttgagaccagcttggccaacatggtgaaaccccatttccactaaaagtacaaaaatcagccaggtgtggtggtgggtgcctgtaatcccagctactcaggaggctgaggcaggagaatcgcttgaacccatgacctggaggctacagtgagctgagattgcgccactgtactccagcttgggcaacaagatttgtttctctaaaaaaaaaaaaaaaaagactggcccttccccttcagctcttcctcagggtccctgagcactctacacccccgtctacactgagcactccaccctgctgtctacactgagcactccaccctgccatctacactgaggactccaccccactgtctacactggctgcctcccgccctcacctcctgctaaggccattccccgctgcatctgtcttctagattctgcagccttcagcacgctgggcccctcctttgtccccttgagccacctccagcctccccctgagctgctactcctctcccagcagcctccacccaagcccctccagtccccaagctgtcccttgcatccagcactgcccttccacgtgccccttccctccagcttcacagcagggtggggcctccaggccctgcccactgtgcccatccacaagttgtggtgggagctccgaggggaggcaggggtgtgcatggacttgggacgtccaagtctgggaccaggggcagctggttggtggagtgtggagggggatagggactttcaggtagagaggctgtaggggcaagatcgggacggcggatgtccctaaggagggctctgacctgggaaatattgtgcagcttcctctttgccattcctggagctcagacactggccggctctcaccccgcccttcctgcaggacacagctccatcccagtgagttcctagtgtagacatctccagcagcacggatgggaaaggaagtcatcaaaggtgcccaggaccggaggctttttctggaggtggcagaggagggtgtgggtctcagggctctggctgagggcaagcgtgggaggtcttaggtctgcaccagccccgtgaaggcccctcctgctccctggtggagtcctagagggaacagcagcccctaggctctagcaggagtgggtaggggcttttctggcttcctactgtgccagcaggatagctgggcctggcactgagcccaaagatcacatgccggggcattggcgcagtgaggaacagacccttgccaaagctggcaaagaagaccccatggggtgcagctggtgaagctgagagctcaatgtttgggggagcctggcaaaaggggtcctcccctccctctgcaggccaggatcgcaggttttccctacatgttggtaattctcaaacaatcccatggccactggagcaaagatcacagtgggcggcggcctcgggagcagtggacagggcacgcagtgcctttgatgccagagccctcgccccaaagtcaacaaactctgcagcggactttgcacccggactttgttttcaccatacaaggaaagggacagatcacaggccctctcgctgccctcgctgagccggaagctgcagcgtgagctctctcaagccccatttctaggttccccaggcgcacccctgagcccctactcgcctattaagttctcctaatagcccttcaaggtcttaatgtatgtccattagacagaggggaaaactgaggcgagggcaagtgacttgaccgaggttcctcggcgagcagggcgtggagctgagaacctcgttattactgctccccacacaaccctctggccgttcttggaagaaggctgagccccgggggggccagagtgacccaaacaccatgggccgcctgcggtaacacgtgcggccacgaaggggcagcagtttcccgcccggccgggctctctccggcgctcagtatccgtcccaggccaagaagaagaaactcggggaggagggcggagggggctgcgtgggagggcgtggaagatggacgtggccaggggagtggcagctgcacacagtggatgctgttaagatgaagggaaagaacgtgggctccgagatcactggacacggttccacctttcttcccgctcactgcatggccctgggcgggttgttgaacccttggaaacctgtttttccttttttcctttttttttgagacagggtcttgctctgtggcccagactggagtgccgtggcacgatcttggctcactgctgcctcccaggttcaagtgatcctcccagctcagcctcctgcgtagctgggaccccaggtatgtgtcaccacagccggctaatttttgtatttttttgtagagacgggatttcgccgtattgcccaggctggtctcaaactcctgagttcaccggatcttcctgcctcagcctcccaaagtgctgggattactggcatgagccaccgcacccagcagagacctcagttttctaacctgtgccagcaggaataatgatagctgcctagcttggctgtgctgggaattaagtaagatgaccgggtagcaaatatgaagtattactggacacagagggccccaggctgggttagcagcggtggtcagggctgctgcttcctggcctgagctcgaaggagggccctcattaccacctgggtgagtcctcgtccaagcctggcactgctgcgtgggaataacttctgccacccaagttggcagattgtgtgcaaagttaagtcctgactctgtggggtggacttcgaggcctcttcatcggacctgcttccggtgactgcattcgcacctcctcctgttcctggtttaacacagcccagctttcctcctgctgagccctccctgggcctgctgtcaccctcgtgccgctgtgcctcgcagtgccactccctgtaccctgaatactttgccctgcctctccacccagctgagagtcagggcccctgtgaggctctgcccagcccgtcctccgggtttctgcctctgctgagcacttccctgcatgattgcttctgagagtccccccagcctgtgagcttctcaggactgggacagcttctcaggaccgaggcttcctggtctgcttgcaattttacaggcgggcacattttcccttggccaacatcagagactggacatctgcagatctgtgctagccactgagcacccaggcaccccagcaggtagctctgtaaccaacccattctgtaaagctgaggctcagagaggtgaagcgcctggcctggggccacagcctgcgtcagctgcagagccaggagctgagatatgcacctgcggctctgctcacagggtcctgcacagactgctgctggagccacctatgtagagtcaagagagttcatgttaactccctctcacatccctcagccagggtgggggctgacgatagacactcagggatggcctaccctccccaacaacccccgtcaggtttgccggatctccttggaagaaaagttctgggcagaattccaccgttggcctggcctacactctccttagtggcttaggaccctcagcggtggataagttgtgggcagaagagatgcaatcaggattctcacccactcaccccttgccagccccaataagctcaataagctgggctcggtctgaggaagtgtccaggaaatgtgcaaatggcctgggacagccctgtgttcctttcagtaaggttgctgaaggtgaggctgaaagttggagaaacagaagccagtgcttatggttttaattaagataatggaatgtatgtatgtatgtatgtatgtatgtatgtatttatgtatttatctttagagatagagtctcactctgttgcccaggctggaatgcggtgacacaatcatagctccttgcagcctcgacttcctatgcccaaatgatcctcctacctcagcctcctgagtagctgggactacagacacacgccaactatgcctagctaatttttatttctattttttgtggagactgggttctcactttgttgcccaggctggtcttgaacccctagcttcaagcaatcctcctgcctcagcctcccaaagtggagggattacaggtgtgagccaccacacctggcctggaatttatttgtattctgcttataaaattaatacattcttattgcagaaaagtttgaaaataaaagaaaggacaaagaacaaaaagcgtatataatttcacagctcagatctcactgctattaacatttttatttactttcaggcttttttctttctaggtacatatgcagagattattttattttatttattttattttatattttattttatattttttatttcattattttattttattttattttattatttttagagacagggcctcactctgtcacccaggctggagtacaatggagtgatcatagctcactgcagcctcaaacacctgggctcaagcaatccccccactcagccttctgagtagttgggactaaagtgtgagtctggctaattttttttactttttgtattgacagaggtctcactatgttgcccaggctgatctcaaactcctgggttcaagcgatcctcccaccttggactcccaaagtgctgggattacaggcatgagccaccatgcctggcctaaaatgccactttttgtcatttactaaaatcccatggacactttgacatgtctgtattctatgctattgatctgactgttggcatctacatcattatggccatctatcatctatcataatccattttaacattaaaattgtgctgctgcttagatttttctggcctgtctcctatttgtattcttccagataaattttagaatcattttatcaaattccccttgcagaaaaagccctattggattttggttgaaaaatactgaatttttacattaacttaggaaagggctgggcacggtggctcacgcctgtaatccctacacttttcgaggccaaggcaggtggatcacttgaggttgggagtttgagaccagcctggccaacatggtgaaactcggtctttactaaaaatacaaaaattgccaggcgcattggctcacctgtaatcccagcactttgggaggccgaggtgggtggatcacgaggtcaggagatagagaccatcctggctaacacggtgcaaccccgtctctcctaaaaatacaaaaaattagccaggcgtggtggtgggcgcctgtggtctcagctacttaggaggctgaggcaggagaatggtgtgaacccaggaggcggagcttgcagtgagccaagatcgcgccactgcactccagcctgggcgacagagtgagactccatctcaaaaaaaaataataataataatacaaaaattagccgggggtcgtggcgtgcacctataatcccagttacttgggaggctgaggcaggagaatcgcttgaatccaggaggtggaggttgcaatgagcagagatcgtgccactgtactccagcctgggtgacagagtgacactctgtgaaaaaaaaaaaaaaattctgaaggattgagactcttagactcttaggtcttcctatccaagagcacaatatagcttttcatgtattcaagcctttttcaatgcatcaacagaattttacagtttttttcatgatatcctgctatttcttataaaatgtattcctagatattctgcatgttttccggttgtttgttaataaatatttttcatttgtcattatttcctaattggctgttatttgtatatatgacatctgttgaattttttgattactttgaaaatggccattcttttgtgtttttttttaactttctattttgagataattttgacttacagaagatttgcaaaaatagtacagagagttcctgtttcccccttatgttaacccagtttctccttatgttaacatcttacataactacagaacaattgtcaaatctaagaatcaacctgggcacaatgctattaactaaactgcagaagctgttcagatctcaccagttcttctactgctccccttttctcttccagtgttcaatccggaatcctacattatatttagttgtcatttctctttggtgtcttccaatctgtgacagttcctcagtctttctttgtctttcatgactttcatttttttatacttttgaaaaatactggccggttgttttgtagaacgccctcagtttgggtttgcctgaagttttttgtgattagatcgaggtcatgcattattggagagggtgccaccgcctcgatgtgcaagctcaatgcatcatatcagagggtttgtaatgtcagtttataccgccggagaccctaacctggagcatttcgtgaaggtgctgtctgccaggattctccactagaaagttactatttttccctttttaattactgaatgtctgaggggaaatactttgagactatgcaaatatcctgtttctgctttaacttcggctcactaagtttagcattcatctatggatctcgcttatagcaagtattactgtggagttctaatggtaattttctgtttctctcattccttcaacctttattaatatgcttcttcctcacttattcattttgtttcagttgtttataccaacatggatttgtggatattggttttattctttgggttgcaattgaatcctatcattattttgttagtcagttgttccatccgaccttggtcattaggagcccttgaaatttggctcccatgcctttttttttttttttgagaccgagtctcactctgtcacccaggtttgagtgcagtggcatgatcttggcttcctgcaacctccgcctcccaggttcaagcaattctcctgcctcagcctcctgagtagctggtattataggcgctccaccaccttgcccggctaattttttgtatttttagtagagatggggttttattatgttggccaggctggtctcaaactcctgacctcaggtgatctgcccgcctcggcctcccaaagtgctgggactacaggcgtgagccaccacacctggcctcctatgccattttaacatgcccgtcttttctttttctttcctactttctgtgactgtaagaagctccaggatacatttttgctgccctagacttagcctcaatcagttctcagaaaagctctggttctttttatgggatacttagaaaactagctctgtatggcctggcgcggtggctcacgcctgtaatcccagtactttgggaggccgaggtgggcagatcacagatcacgaagtcaggagatcaagaccatcctggctaacatggtgaaactctgtctctactaaacatacaaaaaattagtccaggcgcggtggcgggcgcctgtagtcccagctactcaggaggctgaggcaggagaacggcatgaacccgggaggcggagcttgcagtgagccgagatcggcagccactgcactccagcctgggccacagagcgagactccgtctcaaaaaaaaaaaaaggaaaaagaaaaaagaaaactagctctgtatgctagttttttttttaagacagggtctctcttgccccagctggagtgtagcagcacgatcacagctcactgtagcctcaaccttctgggctcaagcaatcctcctgcctcagtctcctaagtagctgggtctacaggcatgcaccaccgtacgtggcaatttttaaaaactgtttgtagagatggagtctccctatgttgcctggtctggaactcctggcctcaagtgatcctcctgcctcggcctcccaaagtgctgagattacaggcatgagccactgtacctggcctggccaaggtctgtctttttttaaaagaagttgttgtatagttgtttttttttttatttttttttctgagacggagtctcgctctgtcgcccaggctggagtgcagtggtgcgatctcggctcactgcaagctccgcctcccaggttcacgccattctcctgcctcagcctcccgagtagctgggcctacaggcgcccgctaccacgcccggctaattttttgcatttttagtagagacggggtttcaccgtgttagccaggatggtctcgatctcctgacctcgtgatccgcccgcctcggcctcccaaagtgctgggattacaggcgtgagccaccgcgcccggcctgttgtatagtttttatctcgagttttctagcgatttaatcatattggttacaaaaaaggatgattttactacctcctttccaatgtttctacatattttttcattttatctaactgcattttaaaataaacttttaattttagaatggtttcatatttacagaaaatgtgcaaagatagtacagagagttcctgtgtactccacacccggtttccttattattatcttaacgtgatacacaattaataaaccagtaacattattattcactgaagtccacactttctttttttttttttctgagacggagtctacttctgtcacccaggctggagtgcagtggcgcaatctcggctcactgcaacctccacctcctgggttcaggcaattctgtggctcagcatcccaagtagctgggaatacaggtgcccgccaccacgcccggctaattttttgtatttttagtagagatggggtttcaccatgttagccaggatggtcttgaactcctgacctcgtgatctgcctgcctcagcctcccaaagtgctgggattacaggcgtgagccaccgcgcccggcgtccatactttctttagatatccttcctttttacctaacgtccttcttctggttcaggatcccatccagaaagcaacattacccctcgccatcacgtcttcacaggctccccttgacgggaagagttcctcagactttccttgtttttgttgaccttgacagttttgaggaggactggtatcttagtctgttttgtgctgctatcacagactagctgagaccgatacatgatacatgaaaaaaaatgtattcttacagttgtggaggctgggaagttcaagacgaagttgctggttggtttggtctctggtttcaagatggcgccttgctgctgcatcctctggagaagaagaatgcggtgtcctctcactgcagaagatggaagcgctaaaaggaatgaactccctttgccaagccattttataatgggcattaatccacaaaggatgaaaccctgagaaacatcaagctttaaagcactggttctcaacctttttggtctcaggagccctttatactcttaaaacgttttgaggatcccaaaaaaaggcttctacaggttccatcttttaatatttaccatatcaaaaattaaactgaaaaaattttaaattatttattcatttaaaataacaaggataaacccattacatgctaacataaatcatgtattttatgaaaaatagctatatttatcaaaacaaaaattagtgagaagagtggcatgtataattttttttgtttattttttgtttttagatggaatcttattctgtcgcccaggctggagtgcagtggtgtgatctcggctcactgcaagctctgcctcccaggttcacaccattctcctgcctcagcctcctgagtagctgggactgcaggtgcctgccaccacgcccggctaattttttgtatttttagtagagatggagtttcaccgtgttagccaggatggtcttgatctcctgaccttgtgatccacccgcctcagcctcccaaagtgctgggattacaggcttgagccactgcgtctggcctaaatttttgtgaatgtctttaatgcctgccttctcatatttgtttctgcattcaagttattgcaaaatgttgtgttggttgaagtttgtaaagaaaatgtggcctcatacagttgtgtagttggaaaggcaagagtattttgattctctcttcaaacaactatggacaacctgctgttacaaaaccagaatgcaaaaagttgtagtaaatacaggttaggtgtagtgtggaatctgaaagcatgtgaatgaactttctgagttttgtaacattaaagtccagttgcgttaagctactgtgatagcatatagcattgtcctaatactggaattagtatcagaagtggggtgctactgttaataaataaaaagaaataaataaatcatgtgatactggctcagaagtcaggcagtaggctgtgtggaacctgacatcacgccatgtaatacattggcaaccatttgatccagctgtctgtcatgatgacttggaaagtcaaccacatacttacagagcctgtagacataggggaaaatagtataaaacagaatactaacagtggaccttggttcttgccagttgcatttagccaaatattaaacaaaagagatattcttgggcagcaactggaccatcttcaagtaaaagtgaaaggtaataaacagagtccagacatttgtgcccatgcgggttaagaaaaatccagttgcttctagacaccgtatatgaaaacaacgctgaaaacaagcctttgagtggtaaaggccgattaacactcagcgcggtaacaaagaccaggtgggctaacccgaaatgaaatgagaagcctgtggtgatgaggaggcagagaagtaaaatcaagtttgagcatttcgtttaggagagtttgggctctgattacttgcacatgcaaacgaactggaaacaaacagatcagatgtctaccacttcttcgagggaattgcattgccaaagaagtcatgaaagcagactctatactgattaggcattaaaacaaaaacaatctttaggcccctaaacttgcatgggcaggaagtgggctgtcaaagctgttcatcctctaaggtggacctagttcctagtccccagtatacacttcagatgtggccctggaggacactggacatggaggacctcccagaggatgaggctagggcttcatttctccaatgacctcagctgcctctatttccccttcttcctctggaagtcctatcatcgttattattattattatcatcatttttattttgagataaggtctcgctctgttgcccaggctggagtgcagtgacatgatcatggctcactgcagccctcccaggctcaagtgatcctcctgcctcagcctcctgagtagctgggagtacaggcacatgccaccatgcttggctattttttttttcagtagagatagggctctcactatgttgccagggctgatctcaacctcctgggttcaagagatcctcctacctcagctcctgagtagctgggattcgggtgcacaccaccatgccaactaatttttaatttttttttgtatggacaggatgtacagtgttagaaatggattgcttgcagaggcaggaggatcacttgagcccaggagtttgatcacactgtgaaccatgatcgcacccctgcactccaatctgggcaacagagtgagaccttgtctcaaaaaaaaaaaaaaagagagagagagagagactcaaagataggcaaaaaagtgggaaagctttatagtggacaaaaaggaacgctctaagtctgccctattggcatggtgctgaaggtgggctaactagagatagggggtactatgtggttgactatgggtgcatctttggctttccctgggtgatcctaagttggaagcagggacaaaaattagggaagctgttagttattcatcacgttctggcagtagtggactggttgtgatagaagttattgttttggccaggtgcggtggctcatgcctgtaatcctagccctttcagagttcaacgtgggtggatcaggaaggagggaggatttgggaggtcaggagttagcctggctaacctggcgaaatcccatctctactaaaaatacaaaaattagctgggcgtggtggtgcatgcctataatcccagctactcgggacgctgaggcaggagaatcagttgaacctggggaggcggaggttgcagtgagccaagatcgtgcccaatttcatctcaaaaaaaaaaaaaaagttatcgtttagcttcctcgattgttactggacgtagtaatctggcttcctgcaagtctaactttcagcagactggctacatgggctgtgtactgtagataaggcagtaagtaaagcaaaaattgatagagcatcaaggataaatagaaaatccgtaatcaagcagaagatttgaacacttcactttcagtaactgataaaacaagtagacaaaaaaaatcagtaaggatgtagaagatttgaacaacgtaattaacaaacttgacttgatttacacgtctagaaccctgcagaacacacactttttcaagcatactcagaacatttatataaagtgaccatatggtggaccataaagcagtttcaacaaatctcacaggagtaaaataacagaccgtgttttctgaccgtaagtacagttaacctagaaattgaaaacaaaaagctagaaaaaccccatgtatctggaaattttaatatacactttgaaataacaaatggatcagagattaattcaaataggaatttagaaataccttgaactgaaaaataatgagaatactataccccaaaactgtggggtgcagctgaacagtatatagacgaaaagtatactcatatgtgcataccttaaggagcggggaggattgaaagttaatgggaggcaaaagcaggtggatcacttgaggttaggagttcaagatcagcctggctaacagggtgaaaccccatctctactaaaaatacaaaaaattatccaggcgtagtgaggctgaggcaagagaatcgttggaacccaggaggcagaggttgcagtgagccgcgattgcgccactgcaccccagcctgggagacagagcgagactccatctcaagaaagaaaaaaaaaaaagaaaaggccaggcgcggtggctcatgcctgtaatcccagcattttgggaggccgaggtgggcggatcacgaggtcaggagatcgagactatcctggctagcacggtgaaaccccgcctctactaaaaatacaaaaaaattagccaggcgtggtggcgggtgcctgtagtcccagctactcaggaggctgaggcaggagaatgtcatgaacccaggaggcagagcttgcagtgagccgagatcgcgccactgtactccagcctgggcaacagagagagactctgtctcaaaaaaaaaaaaaagttaatgggataaacatccatctcaagaagttagaaaggaatgacaaataaaccaaaaaaaaaaaaatcaaaagaagaaaatcataaggtcaagactataaagagagtggctgggtgcagtggctcaggcctgtaatctcagcattttgggaagcagaggtgggcagatcacttgagcccaggagttcaagaccagcctgagtaacatagagagacctcatctttgctgaaaataaaaataaaaaattagccaggcatggtggtactgaggtgggaggatcacttgagcctaggaggttgaggctgcagtaagccatgattgtgccactgcacttcagcctgggtgacagagtgggaccctgtctctaaaaaactaaaataaggctgggcgcggtggctcaaatctgtaatcccaccactttgggaggccaaggctgaggtcagcagtttgagaacagcttggccaacaagatgaaacctcatctctactaaaaatacaaaaaattagttgggtgtggtggcatgtgcctgtaatcccagctacttaggaggnnnnctntngattatattttctccttcctacgtcgttattggactgaattcagaatgatgactctcattggagctcttcctgtctcctaactacagtggcttccgaccccactctggttttcacttcacccctctgctgctcatacgagtagatacttccttccttctttctcacttgttgctcttcctcaaccccccccgttggtgtcccctcctctttatctttttctcgcgacacctgcgttctcttgccctcttatcatccctttctcgaggcggtcctttcctttatccagcttaaataccttctcctctgtttatttgggggttgggtttttatctctcaccctccctctaatttctttcctctttccgcacccatcaagcctctcgtggtttctcttcctctactctcgggtcccccccctctccccttctttttttcttcacccccccaagcgctttgccttttttttctttgccctttattcccccc

SEQ ID NO: 7 - DNA, 29430 bp, Homo sapiens
  unsure (4336),(4345),(4349),(4392),(4447),(4490): Identity of nucleotide sequences at the above locations are unknown.
aggggaagggccggctccgtagctcacacctataatcccagcactttccgaggagagaggatcatctcaggccaggagttcaagaccagcctgggcaacacagcaagaccgcatctctacaaaaacttcttttaaagcttaaaaaaaaaaaaaaaagcaaagaggacagttcaggagaaaagcctgtagaggcagcacactaaggaggagacgcagcccaggcaccaggaggggctggccatgggcactcactcctccagcaggcgagtgcccagcaccagctggcccacccagacacccaggacacggcctgaatggctccgtattcacgtgggtggtaataaacaagcaatacacatagccaataaggacaccttagtaatgttacatcataaacgctgcagatcagggaaatggtgcagggtgaagtgggttggggggctgcatgctacatgagaagtgggtcggggggctgcatgctacctgagacagagcaggccttgctgggaaagaaggagccggcaggcctgggcaaaggtcctggggtgggagcacactggagcagagtgtgggggtagcatggcgggtgctggtcctctgggcgccttcccaccacgtcatgtgcccatgtgcccaaggtctctcgtttcacagccccctgaagctcaggggtcacagctacacagcccccagataccttggcctgccccaggtcattccatccagtgatggacctgctgacctctagcctgacctctgggcagcgtaatttgagaaggaggagaagggagggcaacagacctggggcgatgagggatgcacagggtggcagacacctgaggctgcaccttggagcctcagttctgggtgtgggtgggggatggacaggctgagggctgaagcagctgggcccggccaccatcacaccccaggacccaccagatcaccatgaaaaaccgaatgtcaactggcagcccagagtgcagaacaaacctttcagaaacacggtggtgactgccgcatcatgaacataaaataattacgccctctccccagggatcacccctgcaggagtttgtcccaagaaacaccagaaagaaggaaaacgtctgagtcacaatatttgctgaggccttatttgtaatagcaaaaaaaaaaaaaaaaaaagaacaatctccagcggcaggggtaactagactattgtctccgtggaaaggtagcaccaattaactagtaacaaaatgactgcggtaacaacaaaacgttcgacatgtcaacaccaaaaaccacacacccagcataaccgtgaaccatgatttctactagaatgaatggcagttatgagaaagcaccagcggagacaaagattgaaaaagtaaaggtggcctcattagggagacaagtctctgggtaatatattgtaatactggtaaatatatagtttttaatatattttttaattccaaattccatatatgttcctatgaagctatttctgcaaatatttttttcaggaccgtacatcacaaaggcaaaagggccaggtcagctctccagctgagagtgaccacttcagagcagacggcagactccagggttagcaagcctggctgagacctggcccatgacaatcactcaacccctctgacctcaacatcctgtctgtgaaatggggataattactgcacctccacatcacagagtgcgaggcttaaacaggatgcttcatagaaaagcgctcaagaggtaacagccgggagggggtagtggttttcattaattaaatgttgccttcatccagccctgggccagctccaacacaaagcacacaccatccactcagactcagttgcctggattcaaagcccggcctggcctccagctgtgagattccgggcaggatttcccatctcccagagcctcagtttcctcattcatgaaacaggaagtgatcattccttttatttttatttttatttttattttgagacggagtttcactctagttgcccaggctggagtatgatggcgcaatctcagctcactgcaacctcggcctcccagtttcaagcgattctcccacctcagtctcctgagtagctgggattacaggcacacgccaccacgcccagctaattttgtatttttagtagagacggggttttgccatgttggtcaggctggtctcgaactcctgacctcaggtgatccgcccgccttggcatcccaaagtgctgggattacaggtgtgagccaccaagcccagttgacaactgcttttaaagacacctctggctgctgtggaaaacagcctggtagtgcctcaaaaagttacacatagaatgatcctatgaccagtaattccactcctacatatatacccaaaagaactgaacccctctactcatgtatgtacacatacaggtacacgcatgttaacagcagtgttcacaaagccaaaacatggaaacagctcaaatgtccataaccgatgaacggataaatgaaacgtagtctattcaccacctgacggaggtgagaggggccataaaaaggaatgatgcataaaaacgaatattatggccaggtatggtggctcacgcctgtaatcccaggactttgggaggctgaggcgggcggatcacgaggtaaggagttcgagaccagcctggccaacacggtgaaaccccatctctactaaaaatacacaaattagctgggcatggtggagggcgcctgtaataccagctactccggaggctgaggcaagagaatcccttgaacctgggaaacagaggttgcagtgagctgagattgcaccactgcactccagcctgggcgacagaccaaaactccgtttcggaaaaaaaagaaaaaattagccaggtgtggtggcgggtgggtccctgtaatcccagctctacttgggatactgaggcaggagaaccacttgaacccgggaggtggaggtagcggtgagctgagattgtgccactgcgctccagcctgtgtgacagaaggagactctgtctctaaaaaacaaaaacaaaaaaggcccgacgcggtgtcttacacctgtaatgccaacactttgggaagccaaggcaggcagatcatctgaggtcaggagtttgagagcagcctgggcaacacggtgaaaccccatctctactaaaaatacagaaattagccaggtgtggtggcacatgcctgtaatcccagctactcgggaggctgaggcaggagaatcgcttgaacccaggaagcggaggttgcagtgagccgacattgcaccattatactccagcctgggtgacagagtgagattctgtctcaaaaaaaaaaaaaaaaaaaaaaaaactaaacaaaagcaaaaaaaccaatgagtaatgttgtcaagtgaacttcatcccaatgggaatgcagataatttgtttaaaaggcaccatgcacactgggcaggctggcttcccctgggaacgtcttcttttgcctggattcccagttggtttaatcgggcgtagaacactttcttcaatccgggattcaggcacccctgctcagcacaaactcagtacaccccgcactctgctgtgggttcttggcactattaggagaatgtgagggggtgattcagatctatctctagtgggtgcatgtctgccactcccaggaacgcccacttctggcaagtcagtgtcagagaaaggccagctcgtggcccctcctgccttgagtcccaggacccgtgatcagtcctacccggagcagaatcaggagtttgaaaacccaagtgccaacaatctcattttaacccatgtaagcatatccaatatttatatatagaattcataacagatgtctgggcttccattccaatagcctatattttacactgtttatttacatggttacaccaaacaagactcaattcaaggtaacccaatcctttgctactataccaaaataagcaacattttcagtccatgccttatatatattcaccaagcattacactaggcctccaactgctcatcggagcaagctgcagcctggacacaagctagagattaatcagtcaggaatgatcctgcgtccagtgccagcatgatggaagagacagagaaacagaagacatcagggctccagagtcaaggagcctgcaggttagttgggcaggatatacacacatacacacacacacgcacacacaaaaccacccaagaagaaaaggtgggatgaatgcatggacaggtaatgcctggagcctggggatggataagctgactgcaggtggcccaggcaggcttcctggaggaagaagacctggctgtangtggggtangcangctttctaaatggggaaaatctggctgtgggtggagttggcangtttccgaaaagaagaaaagctgactatgggtacacctggctgttggtggaacangcaggcttcttggaagaagaaaatctggctgtgggtggatcangcaagcttcttggaagaagtaaacctgactatgggtggaccaggcaggcttcctagaggaagaagaccggctgtgggtgaaccaggcaggcttcctagacagaggaagatctggctgcggttagagtgggcaggcttctaagaagaggaagggctgactgtgggtagacctggctgtgggtagactgggcaggcttcctggaggaggaagagctggagcattgaaaaacaaacatgacttggtgaatgttgagcatgcccaggcctgatccccagaggcaattacgcactcaagttacttaattctactcacaatgcctcacaaacaacttctctgacacctaacacagctctgggcaccttctagcttcagctcctcaaagcagttattcacgctactaccctgcacacctcctcacaccccaaccccagggacaggagttctgccagatgccaaagctcctgatgccaaagcctgggtctgcttccgggctcctcttggtctaactgtccaccccgcatcggcatgatgtgcaaaaacaaggctttgcaatctgccctgatgcctggcggagcgagtccctcccgattcgtctccttcagaaacacctgggctgccctggtcctgttatacccccaacacattctacagtcagctccgcaagttccacaaagatcaacgctggcgtttttatggcattttatttacagtttttacaatataaaaaaggaaggatgccacagctcagccagcaggacagacagagatctatgatgcttctgctgcaccattgtttgtggtcaagaaagtctgttttcaatgatttattaaattgtggtgggagatggatggtggcagtggttaccagcaacatgaatgttcttaatgccactgaacttcacacttacaaatggttacgacgataagtgttatatgtattttaccacaattaaaaacaggtaaatgcaggccgggcacggtggctcacgactgtaatctcagcactttgggaggccaaggcaggcagatcacctgaggtcaggggttcgagaccagtctcgccaacacggtgaaactctgtctctattaaaaatacaaaaattagccagatgtggtggtgcatgcctgtaatcccagcttctcaggaggctgaggcaggaaaatagcttgaaaccgggaggcagaggttgccatgagctgagattgtaccattgcactccagcctgggtgacaaaagcaaaactctgtctcaaaaaaataaaataaaataaaaataggtaaatgcaaacatatggtatagtaatattatgggctattatgagctacaaaaaagaatgacttgggactacagttacagccctcattcaggaatttgttttaaatgtgggttggtcgctaaggcatgtacacaacattttgacgttcaaatattcctagatttggacagtgagcacccctctaagctggctcttctgtcccagaggtccccaccagtcctccagaacttctttgctttcttacacaataagatgccccatgctcggcttgtacctttccttgccccagccctagaaccagcttcttcgtggacaagctctgactcctttgggtggagaatggtattcagaaacccagacctgggctctggtgtgctcactgctacttggggtcattgcttctaggcctctctgctgatggaggtaggatatacacgtacagtcttccctcttcccagattccgtacttgagctcgcctacttgctaacatttatttatatcccccaaattaaacctcacagcacttctgcaatcactcactgacttgcagagtgtgaaaaaactgagtcaccatcacacgttccaaactgaggtcaactgaggccacaacgccccatcttcttgctccggctgtcgagatgtaagcaagtgtccttctctcggtctagctagtgccatgctttccacatcactgtgctttttgtgggcaattttgctgtataaaatgtcccctgcacatatgctgctgtgtagtgctcctaggtgcatgaggctgccccacgccttacagagagaatatgcatgagaggctttattcaggtatgagttatagcgtagttggccatgaattcaatgttaatgaatcaacaatatacagtaaataaggtgctttttagagacagggtctcactctgtcacccaggctttagagtccagtggtgtgaccttggctcactgccgcctcaacctcctgggctcaagtgatcctcccacctcagcctcccaaactgttgggattacaggcgtgagctactgcactcagcctaaataaggtgtcttagaaacacacataagacaaggttatgggctgagtgcggtggctcatgcctgtaatcccaacactttgggaggccaaggtgggaggttcacttgaggccagaagtttgagactagcctgggcaacatggcaagacctcatctgtatatttttttaaatcagacaggtgtggtggtgcatgcctatagtcccagctactggagaggctgaggcaggaaaatggcctgagcccaggaggtcaaggctgcagtgacccatgattgtaccactgcattccagcctggggtgacacagcaagacgctgtcttaaaaaaaaaaaaaaaaaaagccaggtcaggtatcgaacagttggcaaaaacgttgtgacctgaggctcacaggaacctagcccgatgtttcccctaggagcaatggttcagtattcaataattcagggttcccagtgactttatggagcataactttcaagaataacaagaaccaactgtacgtgtgtatgtatactcacacttttattttattttattttattttttgagacagagtctcactctgtcacccaggctggagtaaaatggcgtgatctcgactcactgcaacctccgcctcccaggttcaagtgattctcagcctcccaagtagctgggattacaggtgtgcccccacaaccggctaatttctgtatttttagtagagacggagtttcgccacattggccacgctggtctcaaactcctaacctcaagtgatccacccacctcagcctcccaaagtgctggaattacaggcatgagctgccgtgcctagcctacatacacttttatacacacatgcatctatgactatttctctatttctgtgcatgtgtgcgtggcagtacctacagtttcagctatgtgtctgggtactgtctcgtccaagtttgtaagcaccttctccaaagtgcaaagcctggcttgtgttactatccatatgtttacttatttgctcaatcaatttacttattagctccataaccagcttcccatctgctccagtagcctctgctgtcagtcacctctgcaccctaccccaccttgcttccggatgctggatgccaatcacccccgacacctctacatagcaccaccctcgacatgctgcttctttatttcttatttatttgtttgagatggagtcttactctgttgcccaggctggagtgcagtggcacgatccaggctcactgcaacgtccgcctcctgggttcaagtgattctcctgcctcagcttctcaaatagctgggattacaggtgcccaccaccacgcccagctaatttttgtatttttagtagagatggggtttcaccatgttggccaggctggtctcgaactcctgacctcaagtgatccaccttggcctctcaaagtgctgggattacaggtgtgagccaccgcgcctggtctgcttctttaaatgccaggcaccaacatttgtgcaatggggtgggaggaaagaacagggaggagagcacactgccggcccctgcactgaatccactgatcaatctgggggcaactgccatctccatctcctgtcttcctatccgtgaacatctactgcagtcctctccaatgtccttctgtaaagttgtattatgttttgcatacaggccttgcatattagttctcagatataatccatatactttatataaaattcaaaccacatttaaaaaaataaaactagcatgactataacggagtctgcaacattctcacagactttatgataaaacatgaaacttcaaagatacttagggtggggcagggacaatgtttaaggctgcctggaagcctccccatccctgagccagaaagtcctatctccccttcaaggggaaatgcttgaaaaagcactgatcaggctaaaatgacagggatcagggagtaatcaaagtacaagtgagctggtctcctccattctgagcacagcaaagttcagtctctccaagtccaagaatcatacacctgtttgccaagaatgaagttcaggtgtctacaagtggctgaaaatattcattgctgggccattaacaacattcttggcaaaaccataccttagcttctcgtggaaatttcttaaggtagaagaaacaggaaacacccaggctcgcttttatgtagacagttccatgaagccagggaccttccccacatccacgtttcaattacctgcacgcagctcacagtgtattcaacatctacgcgtctctcctactggggtggcggtggccactcaaaccctcatgcagctacgatgaccgcaattttggcaacataatttcatgtttttccttgggcttttacccaagtcagtgacacaattctgcagttgtctaaagattcaaaatgagggacttgacatttacaacaataataaaatcttgggtttcctttaaccaagcacatgttctgccttttagagaaagctctgcaaactcaagctggagtgggatacttgctgacatcttcaagcaccccaggaatagctctactcccccatttccaccttggctgaaccatctatatcccaccaattcccccaacatccctccatccgtccatccatccacccaaggacctgctaagccaggaggtctctcccatctaccccacagcctggcctcagcccacaagggctctctctacatgaatcccaccgcaccagagtagaccaagtctcccgtagactccaccctgaccacctccatgcctccagccattcccacccctaaaaaccctccctggtctctacacccagctgatgaatacttggctgaatgtgacctggcctcctggacccaggtgaagcccacgtcctccgtaagcccgccagctcaccctgcctctgcaccttcactggagagagcccgcacttcacctcctcagggcaggcatggctgatgccacccagtggaatctggtgcaaagcagggcccggtgcagagcagggctgcctgcagagcaaggccctggtgctggggccgagcacctccaatgctggccgtggaaccatccctcccattccaggtgctgtctccatcaagaatgagcgagctgctgacatttgcatgacaataatgaataaataccatattttgcttcaaatccagaatagatgtggccagggttggcatatgactgttgggaaaggacagtttgcctcttcccaaaccaacttggattataaaaagcttttcttaacgaccacaagagcggaggagctcaggggcagacaaaaggaaggctggctgcagaaggcgggagagtggggccttcaggggcgggtggggagagagaaagcctggagctgcacccccaaggtctgtgtacatcaggtgctacagaataacaccacctcttccagcttggcccccacctgccctctcccagcccagtcacccagacagcaccccactccccacacacacctcacatctgcccgcctcacactcaccagcttcggctctcaatgcaacctggaacctgcccttggcctctcagctcagccacccccattcctgttggcccctggccccccatcgaattctctctaatcctaatgcacacacttgcacactcaaacacacacacacacacacacacacacagcccagaggaaaaccataattgactgaggtccaggcaagtttcccgagcagggaccacatttcaaaggtcagggaagcaggcgaacaggaaacatacagggggcacgtttgggggtggagcaggaaataagaaatcacttgcaaaagataaaaagaaaatgaggtagctggtttcagacacctcggagcacacagaacaggacaggcgcctccgggtcttccctcaacagggagatgggccaggcaggtccctgctgctccaccgcagagctgggggctatggccctgacaccaaggccctggggcaggcggggaggcagctgttctcctgcctgtgctcccgggcagggcctggccccacaagggaactggccgaaggctctgcttggctactccggaaagtcctgggagacaagcaaaggacttgctaggtcactccaaacggcccagatgtgacaactgtgaagaagccacaccaaagcaaggtgacagaacaatgttggtgacgtcaggttatcagcttacgctcaactccacttacccggactcacccgtaacctgccgtctcttcccaaccagtaaaggatgcctaggtagaggggcacaaggcctggagcataattaccattttaaaggctctgagaagtcctgcggtgaggaagcctagttcactttctctcccctaggatttcccaactgcgcctgatcacagaacattttttcatttccactcaggaaacatattttgaaaaacactggcctagaggcagaagtgaaatggaaaacacaaaagtaaaactgaacaggaggcactgggcagagaacggtcagaggcgccctgaatcctggaccggtggagatccccagcttggcatgctcccctccctgggcccagaccgcctccccccatttcctggataagaaggctaatgcgcatcagggtgaagggcttgcctgggctacacccccaggctcgccccacaccaatcgcgctcctgcgagagccagtgactttcttgatttggctactgtggaattgtttgcaactaaccaccccagatacagatacaaatgacaggatgatcagatgtaaaggacccacaggtctctgtgatacggcttcatgcagccagcatggctagtgccgtgcagaatgagaatgaccccaggcaagtccttgcctcccagacccagaaccccatggagcccaccagggctggttcacaagcactgtctgggtcgggcagagattccagcaagaggagggaacatccatgcaccggagccagttaccagaagcaaatcgcctcttccaaaacccaggctattaatggagtccactgttgagtggagctggggtctagctatggaatactgcacagcagagatcttcctgagagaaagcagttttccctgaaagccatgtgtcctccactaactgtgttttaattgggcgaacgtctgtatctcattgcagtggccgcgcatgtgctgacaaggggctgggggcggggtggggagcagaagctcaggggcctgggagggaaggaaacaggccaccagggctccccagaaggcatgtatctctctcacaaacacacgcatgcacacacacgtgcacacatactctgcaagccctgagttagcaactgtggaatgtgaccagctcagtgatcccaggacaagctgctagggaatatgacatttgattgatgtctgcaaatgtgcgttttcactaattagaaggtttagggcagagcagagaaaaatatgtatttcagagtcccagtttgacctgccagaaaccagcccattactaacattcttattttcaacaaaatatagcattctgattacataccatcttggttccacgcctcctgccttgccaagcccccggaagcggcccaaggccatggcaaatagtgagagaaacagttccagggtggagactgactcaggggtgtcagtcagtggggcgctgatggccggtgggaggccagcagtcatcaccctctccttgggacagttgagtagctctcccccagggtcatgtggccactcaggttcatatgggaggcgagaggagtggcagagtccaggagagtggctccgaagtcactgttccctccaggcctcagtgtcttcatccattaaatgggtaggctgaggtctgggatgacaaggagggcttgcacttactgaaacccatgggaggctgttcgccgatttcttttattgatggaagaaaacactcgtataattcaagtaccaattaaaaggcaggcactggaaccaccgtctgccaattcctagttttgcctataccaaatttgagcaagttaattgacctctcccagcctcagtttcttcgtctgtaaaatgagggtagggatggcccccagcccacagggcagctggaaggattaaagaaatcaaacatctcttagagcccacctggcacactgtgatacacaacaaatgttagctatttttgtctatgaagtctagattttatatcttgggtgttctaaagcaggatacatttatttaaaaacaaggattttcattaaacacgtaccccacagacagcaaccccatggagactgctcttaattcaggccagtatcgaaacgactctaactacaagctttatacaggtctcttggctgtccttcaaatccaactaaggtggtacttctgaagcactgtgcacatgtgtgtgtgcatgcacacgtgtgggaagggcgggctcacggatccctcaggtaccccacccacgcagtctcaagtcacaaagcgacagagcagccgaggaaggtctgtgccccactggaccctcgtgaagccaccaactctacctctgcgccgtgtcctgcagactgggctaccctttgggtggggaccagcatttgatgcaagaaaggcagacagaaaaggaaaagggcaagttcgactccagataacacagacagtaccaagccccagggtccataaatgccacgcagatggaagcatttactgcgaggccacacagcaaacgcacggatccagggacggaggtgcagactgcggtgcccctgagccatgaccctgcaaattaccaccatgggaaaggaggctgccaaaccccccgacagtcggctgggctggcacagactcgtggtttccatcgaggtgggaggaggtgggacgtcccagcccctcccccatgcccactgcagagggaagcggccgtttcccctgtgtggttacaaaggtctcattgttcttcctcacagggaggaaactggaggaccgagctcagaacgcattttagaactggcagaaaagaacatctggggaaggaaacacatttcagaaacaaacatacctttgtaccagcttttattttctttaagtgttgaaaaaataataataataaagacatgccaaatttatcatcgctctacaaaatccctttattgagcaaaacgtggcagctctactttcaaatgattactgttcctggaaaattgcagcaacgtggatgccaaggcccgaaggccgccatcagcagccaaacaaaagatgccacctcgggctccgcgacactgtaccatgccagggaactggacagatttggggaatgccacggtttgcctttaaccccttgcctcctggtctcctgatgcatctcagaggctaacattctttgaggaactggcatttcttagttgtaaatatgcatgtgggtttgggagctgcctgcaaagtccagtgttgacgatcagctttgatttccttggaatcaagtttacgtgtcgagtctggaagttaagaagaatttggagaagctgagcactatggtgttgcaggccctgggtgaactcttccaccaagcattcattgtggactgacagcgtgcgaggggctctgcaggcaggtgcacaggacgaaacacattccgtccgggggaaacctgcaggaaagctccctcttcttcctaaggtgccgggcctagcttcatgggtccctaccctccacgcctgtcacactttctgagtctcatgtgggagctgcttctggttcctgacttcactcagtcctcataggaggtggaactactgtcaccccattttacagatggggagactgggcacaaggggaccaagaaaccaatgcaaagtcacacttgtgggatcagtgacaggggagatcaattcccaggttctttctgcaagagttaaattgttttcatgctgcctaagggggggcaactgaaagaccactgcatatctttgccaaaagggtcaagcacaggagccgcagccagtgggtcagatccgcagaggcgctggggtgaccctccccatacctggagggatgcttgtcccctcctggccttcactgggtcccctcatgaccgtggcctcccaggacctcagcacaatcccggtcctgtgctccaggacaagccctccgtccccaagactgtgaggaaatggaacgaagaggggctcgctgcagcccagcacccacactgccccttctcaggggcaagaaccgtcctggaggacttggctttggagggggagcctgggaggccagtaagtcaacaagcctctactgctcatgggtgggatcccaccgcaggcccccacctgctggggcgggcagggacgggcggcacagcttggccagggcagataacccccaccttggccagggcgaaggcaggacacgtgggctccagcctggccccaccatccctgcacaacactgggcaaagtccacgttttcctcaactgggtgttgacatctgcaggacaggggcatggaggtacagagcgctgaagccacacagcaacctaggagcgagactccatgcctccccggggacccctccccaccatgaggaccatgaaggcttcccatgtgccgcaaggactctggtgtggagacacacgtctcctacacagccaggcctaacgctcttgtaactgggtggtcccacctgggctcacagctggagggccaggagctcaaggcttcgcagggtctgctctcatcccagaggcgatggggagccacagcaggctgcaggagagagggtgggccccctccacttcagaggccccatctggcccacagactggagagcacatctctcagcaaccacggagcgccaactgcgcacagggcctggtcgtcagagcggggcaaaggcactgaccgtcacggccagggcgagggaagacgggtgggcagggaccttgggcagagggggaagaacctggtgcccaggctggccctgccttcagcagtgaagctgagtggggaggcgctgatgcagggggccagaaagggctgctggtcagccgggaggagccccccacagaggaagcagccagcccagacgcagatggcagggtcccctcaacaatgtcctctgaaaaggagaggcggggactgctctggtgacacctacaaatagatagtcagccctcagccccctgccatacttctgacaaagcagaggcccccaggggaggcgcacccgaaggtacctgcacctgtcccccagactcctagagcccacctgaccccatcccaccagggctccagctacaaaataaatgccgaggccagctaggcaaggacgcacactcggtaccgactgaataggctccacgttgtcatgagcgcaacccacaggccaccaggccacactatgcagagctgagatggtttcggccaagcagcctctcagctgagctgaacaagtccagagtccccggggggtcgtcactatggagtaacaattgcgatgcgatggtaaccctaacagctaaccgtcactgagccaggccctgagctaggtacttttcaacgctgcctctctgcagcctcaggacgagcctgtgggagcataaagatcattccctatcacggatggggaaactgagctctgaagcagttaacgtgcttgtcccagaccgcagagctaggagcaggacacaacagcaggtcaggcaggaacgggtgaggggggcctgcatgggcttctctggaggctgcgcatacacgcaacccccaggaccccgaccctgcacctgcagctcgctactgccccctcagtgactccagcaaacctcggggtaggggaaggaggctgggaatacctcgggtgtccgaaacagcagcttctgcttggaggccactgctgcataatggttgctgcccagcacaccccaagccacctgtgccacctgtggtgaccttccagcatgccttggtgaccaagctggccttaggtgctgtgggcagccaagaatagaacagggcccacccctcctcttcacactaacacaaagcaagaggcgggcacttcgactgagtgcatccctctagctcaagggcctcacggatcacaggggtcagggcaagatcccaattctgcattcccgtctgcctttcatcctgctctgccaacaacagccagtgaggctggggacatccctgaacctgtttctcacctgaaacacatcataccattggaccccagccctccgggagaggccctaatccctgactgtggtgagatcagatcactggttaagtacccagaagggccttggtcaggggctccaggggtggggggtgatgggcgtggtggtatcccgctctgggctatagtccaccctgatggaggaggtctgtggtcagaaccgggctgtgcagggcacaggagcccagagggacccccagagctcacctggtggtctctgagcagggctccctcaaccctcagagaaaagcacagcaaggaggccgcccagagcccagcgcctagcacccagtggcgtgccagacctgcctggatcctggagatctctcatcaccctccaagtcagtcatgcccaacccagggacccacagcccacggggccgtgaaggtgtgctgagtccaagaaggccttcgacactgggaagccaagtggcacctcctggtgtggagcaggcggaatcccaccagcctctgctctgccagtgggcacagctggacgatgagcagaaggggctgttgcttaataaacgtcatttccttaagaggataaaacctttcaaaacagatggaaatttttttttaattaaaactggtggccaaagagatggaaagcaccccttgtgcctccctcccatcgtgacccatcctctgcacacctcaagctgttcgctgcccaggtgtctcctgaggcactgggggcgggtgagaatccgtgagccctcggccagccgtggctctctggagctctgccccaggccatcagggcacacgccgggcaccctgggggccacacagggcagagcccagctgggtcagcacacagggccacactgggcacacaagtctctgagcctcccctgtggacgcagctctcactatcccaccccactaggtcccggggatctgtcccacagggtgatatgctgtcacagaccactaccagagccatggcctgctgttccgcccgcagccaggtagtcacttgctccacagggacaggcaacgccgcacttgggggctgctctgcggcaggactagagctccagcagctcagccctcctgagaaggagaactccatgctctaagaggcagacgcagcggacggcaccaaagccaccacaagcccacggggccctgcatggcaggtcaggagtccctgaccactcgctctttgtaaccagagctgcagtggagtctacgaggcaaggactgtgggcggcagtggccacagcaaatgaatgagtgtcccaagggagcaggcggctgcggggaggcacagccgggacccaggagtcctccggcactgcagcaaactccctgggccccctgagcagcgaccaggtggcaagtgcatgaactcccgggggcataacctgggagggtgacactctcttcgtgttcaaattcttgagaacgcattaaaaatatcactcagtcacctactctatagttttaactcaaaagtaccaaagtagccaggcgcggtggctcacgcctataatcccagtactttgggaagctgaggcaagaggatcacttaagcccaggagttccaaatgaacctgggcaacatggagggaccccatttctacaaaaaaagtgttttaaaaaattacctgggcctggtggtgtgtgcctgtagtcccagctactcaggaggctgaggcgggagaaccacatgaacccaggggaggtagaggctgcagtaggctgtgatggcaccactgcactccagcctgggtaacagagtcagactctatctcaaaataaatttaaaaagcaccaagccaggcttggtggctcacacctgtaatcccagcactcagggaggctgaggcaagtggatcacctgagtcagaagttcgagaccagcccagccaacatggtgaaactccatctccactaaaaatacaaaaattacccaggcgtggtggcgggtgcctgtaatcccagctactcaggaagctgaggcaggagaactgcttgaacccaggaggcagaggttgcagtgagccaagactgtgctactgcactcaagcctgggagacagaacgagactccatctcaaaaaataaataaatcaatcaaaaccaccaagactttttaatataaacatttattattccataattccttttttgcatgattaaaaatgtttatataaagtttcctgaaaatggtaagaatgccaagtgaaggctgcaaatgcccaagcccccaccgtggcatctcacggagtctgggccctaggaggctggtgggtaccacgtggacccgagacttcacagtcaagtccctttggggtacactgggtttcccacaccccagaaatatgggctcttactgcaggaccatgggggtcctcacacttggcccagaagctgtcacatagccagacaggtgttctacaacctaggctagagggagctcatgctccagcagaattcgagccagaggaggtaaaagatgggtaagatctgctccctggacagatgaggccttggcctcagaacagttactgatcatctaccagacatcacactagaggcagaggggcgcagacgaagacagcccctgtcctcaaggccctcccaggttgggtggaccatggaaggttccagacagatctggcaagagaagtgcccacaccaggggcagaagatgggcaggtctgctcagggcggcacggcctgccaggccaaaaagttccaacttcagatgctggagaatgggcacgactgtctgagaaagggaaggatgtgatgaaaactacttggagaaaaattaatctggccagagcataagataaatgggcaaaggggaggttccagaaagcaaggagaccaagtaaaagctgatgtcattggctctgaatctaggctttcactgaatatgcaccgcagggcctgtaggtaaagcctcagagcccagggagtctgagtggaggagagggcaggggacagagctggggcctgtgtctacagtgctcaggaggaataggcatggacgtcagctcggaggctccagctgaagtgaggaggcggccagggcagcacggccacgcccggatccagactccttttgggaagcaagttcgctctgggggaaagtttggagaaatggcctttacccgcagaagcaagccccagaacatatcttgctccaaaactatctcgtacagtgaggacgttaagcttcaggtcccctagaggagacagtctgctccttcctggggcagaacccaaggtggccagagcctggaaggcacccagcacccaggctggtgtgttccagcccaggccacacgctcagatagctattaatgccccgttgagcaatttcctgagagctttgccaggcaggtaccgcctccccatctgaactaatacaggggtacatcccaaggaagaaatgaaaggtgcccacattttgctctgggattaactagggaggggagtgataattaactcagtaattatatttgccatcgggctaatgctaaaattagtgtgcattagaatttctttcctgagcagacaccggagtgagttgggcagcaggagtggctcgggcaagtcggcacaaagggcacctccagagccttccacaaatgtcagcaaaacccacaaatgtcaaggccggctccactgcacccagcagatgaattcacttccacagcctgagaccgccagctcatcggaggccatttaaaatccagccctctgacacctgctggatatcaccatttaccgtccccagatcaagagatcaaagggtggaacctgataggacggctctgaagttcaccacaaaagcataaacgtgcaagcagagccaatacgtcttttgaaaaggacaatgaggtgggaatttacataactgatcttaaaatatgttctgatgcttcagagatggagacagcagcattccggtacacaaagacactcacaggcagtggagcacagtgaagggtctggaatcaggacccaggtgtctgtggacactacacataaaagagcagcatttacaatgaatggataggatggaccatcccaccaaggtgttggacaactccctattcactggccagacccctacctcataccatatacaaaaaaaaaaaaaaaaaaaaaacccagacagaataatgtctgaatgtaaaacataaaacagtaacagtcctggaagaaaataatggaggatatatttataatctggagatggagtaacaagggataggaaaaaagccatagggaaaaagtagagttatgattatatgaagcttcttaatatctttatgataatgtaccaccagaaacaaggatgaaggactagctacagaccagcagtgaaacctgaaacaaacagaacaaagaattaaagtccataccaaataaagacctcccacaaatctataagaaaaagataaacaggctggcaccgtggcttatgtctgtaatcccagcactttgggaggcggagatgggtaggtcacttgaggtcaggagttcgagaccagcctggccaacatggtgaaaccctgtctctaccaaaaatacaaaaattagccaggcgtggtggcgcatgcctgtagtcccagctacttgggaggctgagccaggagaacagctggaacccgggaggcagaggttgcagtgaaccaagatggcaatcgcgccactgcactccagcctggaggacacagcgagactctgtctcaaaaaaaaaaaaaaaagaagaagaagaaaaaagaaaagaaaaagacaacagaaaaatgggccaaggataagtgtaggcaatttgcagaaaagtaaataccaataaaccagaaatgagggttgtgcaaatcaaaaggtgttataatttttaaccaaactggaccaaagaaaacaccaaaaaccaaaatcttgtaattgccagcatcagagaggatataggaaagtgtgtgttctcgtagatgcttgcaggtatgaactgctacagccttttaggagttatgtatgtatgtatgcttgtatgtatgtatttgagacagggtctcgctctgttgcccaggctagatctgttgcagtgctgtgatcatggcttactgcagccttgacctcctgagctcaatagattttcccacctcagcctttcaagtagctgagactacaggagtgtgcaatcatactcagctaattttttaaattttttgtagacatggggggtctcccaattttgcccaggctggtctcgaactcctggactcaagtgatcctcctgcctcaacctcccaaagtgctgggattacctggatgagccactgtgcccggcctcaatatctttaaaaacagaaatggacacactctttgactaggaatgtatcctataaaaacacttatacacatgcagagacacacgagcaagcatgctttgtaatagcaatgaaggctggaaaaactcctcaatcaggtaaatgctgtcaagtgcacctgtgtactatgaaatggcacttggcttttaacaagagcaaagacagaaaagcaaaagtacaaagtagggtgtgatggcacatgcctgcagtcccagctactcaggaggctgaggcaggaagatcctttgagcccaggagttggaggccaggagctgggcaatagtgagaaaaaataaaattaaataataataataataaaataggctgggcacagcggctcatgcctgtaatcccaacactttgggaggctgaggtgggaggatcgcttgatcccaggagttcaaggccagcctgggcagcaaagcaagacacccatctcaacgacaaattttaaaaaatcagccaggcaggctgggcatggtggctcacgcctgtaatcccagcactttgggaggccgaggcaggcagatcacttgaggtcaggagttcgagaccagcctggccaacgtggcaaaaccctgtctctactaaaaatacaaaaattagctgggcatggtggcagatgcctgtagtcccagctactgaggcacaagaatcgcttgaaccagggtggcagaagttacagtgagccgagatcgtgccaccgcactccatcctgggcgtgagtgagactcctgtctcaaaaaaaaaaaaaaaaaaaaaacaaggagccaggcacggtggggtgagggagggcacagaagcagcgcctcttctgggggcacccccaatctctagcgatccagaggcctcaggatcctgaagggagaaaaaacgtgaagctccgtgctagaagagaccatagagattggaatcagctggttctattttacaaaaaaaggaaactgaggccctcagaaggtgagtgcctctcaatgccccacagggaggcagggagagggctctgagccctgcagggccctggattcttgcaatggggtggagtggagcctgtgccgcccccaccaggcaccttctcaggagaggagccgttgtcatatccttgaaggggtccttgagcccctcaaaaggctaaaaaccactttcctccttgagtgaaccttcacctcagtttaaccacaagaaaaactacattaaggcccagcgcagtggctcatgtctgtaatcccagcactttgggaggctgaggtgggtggatcgcttgagcccaggagttcaagaccagcctgggcaacatagtgaaaccctgtctctacaaaaaacaacaaaatcagctgggcgtggtggtgcacacctgaggtcccaactacttgcgggctgaggtgagaggattgcttcagcccaggaggtagaggctgcagtaagcggtgactgaatcactgcactccagcctcagcaacagagcaagactcaaaaaaaaaaaaaaaagcaggccgggtgtggtggctcacgcctgtaatcccagcaccttgggaggccgagcgggaggatcaggagatggagaccatcctggctaacacggtgaaaccccgtctctactaaaaatgcaaaaaattagccgggcgtggtggcgggtgcctgtagttccagctactcaggaggctgaggcaggagaaaggcgtgaccctgggaggtggagcttgcagtgagctgagatcacaccgctgcactccagcctgggcgacagagcaagactccatctcaaaaaaaaaaaaattaaatctcaaaaaaaattacattaaggcaaactaaaagatgtttaaaatatatatattaaattaaatacactccaatagagcaaatacgaaaatacccagaaaacacaatccccgcacccccaggacaacctcccagggggtccacagcaagagaccccaagcacgagagacagagaacagtgtccctgtggcggaacctctggcccatcaggctctattagaaaataaggctcttgccactgagagaaagaggcacagtcgcccagcagccacgggctctggcacaccacgagtcaggccagcaaagtgtcaactgccccctacaaggtgacaaactaggacaaactggaaaccagaggctggacctggagcacagggaccaccacatggggctggggaatgggcagggacctcagagcgccacccacatgcctaagagcagcgcgtatgcgcatgcctctgcatggcttagggacacagggagctccccccacccccaacccaggaaggcagcccccactacccaggtagggaacggataggaccagcaccccgttctgctcgtaactcagggctccaggccccctcgggggcaaccagcacagagctcagaccccaaatatcttcacccacctcctggtccccatctggacaagggtgctggggactggctctcagtcacaccctcggggtactcttcaaaggacagctggatgccccagggcaggagcttttggcccccagctccctcaccccagacaccagctcttgggaccccaccagcatgggcaaggtggacaccatcgtcccgattttgcagatgaggaaactgaggctgagggctggcacacggctctccagagctgaagagaatgcagagagcagccggagccagccggtgggtccctgaggccggctcgtagcaagccacagctgcctccgcccatcacacttggacctcactggccccaggacagccctccagggcggcctggcacagagcccacaccctgctgcttcctgaacaaataagtgaacaaggccaccaagccgaggacctggatgtagccccggctcccgccagggcctccccaacagactccccatttggagagcgcattaagtgtttccaaagcctcacaaaccacagatgtccggctgtctcacggcttctgtaacctgaacttggccctcactctgccctcccagcactcctctcagggcccaggcccctcctctgagatgccagcactgactccccaacttgtccccatcacctggctcgttcctgaacctcggcaggagagtctcaggccagatcctcccaccagccacctccaccaggatgcaggaggcatgagacctgctcgtgccggctgggagatgcaaccaaccaagatcaatccaatcagcggatgaactgacaaatataatgtggtccctccacacaatggaatattattcagccacaaaaagggctgaaataggccgggcgtgatggctcacacctgtaatcccagcactttgggaggccgaggccggcagctcacttgaggtcaggagttcaagaccagcctggccaacatggtgaaatcccgtctctactaaaaatacaaaaattagctgggcgtggtggcgggcacctgtaatgcaagctacttgggagcctgaggcaggagaatcacttaaacccaggaggcagaagttgcagtgagccaagatcgcaccaccgcactccaacctgggcaacagagcaagactccatttcaaaaaaaaaataaaaggctgaaacacccatacgtggtactacttggatgactcctgaaaacgttacagtaaccaaggaagtcagccacgaagacgcattgtaagattcccttcatgcaaaatgcccagaacaggcagaaccacagaggcagaaagtcgactggtgttcaccaggggatccggggagagggaacgggaagtcaccgtgtaatgggtatgggttttattttggggtgatggaaatctcttataacttgatagaagagagggttgtaaacactgtgaatgtaccaaatgcctgccttctatactttaatattttatattatataagtttcacctcaatttaaaaaaaaaacaactcgacacctttcacctaggaaagatctggctttagcttgcatttcctgtaactcctgcctaaagccttccagaagcttccgctgccttgtggatcacaaccagactccacaccatgatctggcctctaagggcctctcgcaggacaccccgagggtgaaggagcacccgtgggcccacctctgcatagctgcaaagcttctttccctgtcctcccctctacatgggaagctctgcccgcaggggcggggccttatctgccattctatcgcactcaaccctagcacttcactcggtagcagacaccaaagcaaaacagcaacagcattataccgggccaggtgcacgttaactcactgaattcatggtaggaaggattctattcccattttacaggtgagaaaactgaggcacacaaaggtagcatcagcttcctaagcctcccagcacaggaagcggccaggctggaatcagaccctgggcgcaggggctctgtccacagtgctaactaactactcctgcccccgagggctgcagcggtgagtgagtgagtttgtcagtggactggatgtccaaggtcatacaggaaaaatccagactattgtaataacagcctctagaccggctggggccagaaagatcgaggacgctgacacacaactgcgctcactgcagctctgccagggatggggctaaaggtctcacacagggcagttagggctccccatagcctgggagaggaacggggtgagataacagaaactaggtatggtgcccgaagtcaaacagccactgagcatgtaaacccaggtgggtctgaccccaaacccctccacccccatcagccctgcaacccgtcgctgcaagggagaaagcaactcagaggcctcacctgcctacatcccccacccgtgtgtgtgagttctactaaatgcctgagcagtgacacagcacggctgaaattaaacgggttccaaaaacgacaggaagcacgaagtgaatctccccaggaaagtgctgaacaaatgctggatcgggttcaccggcgaatttcttggaactgaagaggggagctaaacacacggggccctgctttggaggggactctctcagggtgctccacacagcacttggttaaccccactcagcccttctgggctctcccagagggcccggccttggccttgggcatctacaggaggaacctccagggggagagggggtgcctggacaggccggccctggaacaagcacttgggccccgaggagagaggactagggcttgggagctggggaagttctcagcactgggaccactagaacaaagccatttccgtgcgttcacagcttccaattgcaacaggaagcaatcaggaaaaataattagcggcccacttactggcttcgctgaggtccgaggcatgtatttcacacagtaaaaccagggatataacatcaaaaccgttctgcagaaagattcctccctttccttccattttaggcctggatcaccacattcactggggctcccaggccttgctgcctaatgttaaaataatcaactctatttttgcctcacacacaactgaactctacagctataattctttctcctcaggggctcgaaccacatggacgacaggcatttgactccagcaacatcaccccaaaacgtgcacaaaacccaaaactgcaatgaggtgaaaggcaacgcggtcggcctagaaaccccccctttaaaacaaacagtttccccaaaaccccttttgcctccttgacccaggcatttccggaaaaaggagcggcgctggcctgtactccccagatactgtcgctgttttgtcttcaccttgttttgctagctccagacaaggccccacaatgtaaacacgctcctgaaagaggcagatttggggtgaaactgtccatagaatctctaggcttgggtcagaggcaggaggacgtgaaacaaactccaagctcctcctgttccccgctgtcccccacacctccaagcagaggctgcagcctgggggatctgactacagggccaccccgctgcaccattcacactggaaatattcagggagacagctgtttgccttaaggaggcccagacaaaggggcccgaggtcctccccgctaaactgccacaaacagaacaggagccgcggcgtgcacaggcacttgcggccgtgccacttggccagccatactccagaaaaacaaaacacgcacatccgaagagaatgatttaggtagcaagaggcttgcttgaaaaaccacatggcaatctccaaattaaaagaacatgtgtagcgtttcacgactgcttaagtttcctgagtcctcctgacctcaactccaccccctgggaaacaccaaaagttggatgagaaagttcccccgccctacctctccccacgggagtgtacaactgaggcacaagcctgcctcccccactgccccgcgatctgggaccacgtctcctccgcgtagccgacccggggatggacactatctggggacccggcggccacacggggcattcgggtcgcccgggcacctggcaggtgtcagtccgcttggaaacccacagccacgcggctcacaggagcagcgccaccggctaggccgccccgcgcccgggctcagaactttctcgctgccacttcagcccgtcctcggagcacgcggggcggccgcgcggccgctggaaacaggcttgcgaaccggctccccgggccaggcccgcctccgcgccccaagtccccgctcggtgcccggcccgggccacacgggcccagcgcgggctcggctcggctcccggcttcccgcgggctcgggcaggtgaggacccgcccgcgccgcacctggcggagcgggcgccctcctcgccagcccgggacgcagcgtccccggggagggcccgggtggggagacaaagggcccgcgcgtggcggggacgccggggacggcagggggatcccgggcgcgcgccccaactcgctcccaactcgccaagtcgcttccgagacggcggcggcgcccgcgcacttggccgcggggccgcccgggccattgtccgagcaacccgcggcccgtcttacacgccgggcgcgggaaggtatcgaatcagg

SEQ ID NO: 8 - DNA, 33769 bp, Homo sapiens
  unsure (33739),(33749),(33758): Identity of nucleotide sequences at the above locations are unknown.
cttccccttacactggtccttcgacccgcctcggatgaaaactgaatgggtttagccttagaggctctcggtctctaagggaggtgggtcaggatgccggggacagggtcctcttcctggggcaacgtgggggaacgagccacctacccctccactgaattgccctggggtgtgggtaccgacggctcattcggtgtccagggtctgagatgtgttgacaggaagaatgaaaggggatgggagggatggggcgaaagaagccacctgcagccccaggaactatctggccagcacaccgtcacccagcggcctgagccacccctgccagagccaggaggagaccctgccaatgggtcaccagtgtgcaggaactcagaaggtcatcacagttaataccctccatgccccaatgtgggaaaacaggttttttcacaacaaacaagataatttttgttattttggcaaaaggaggcagggcagccccggacacctccatcccacctcatcacccagccgcagggccccggccatccctgcagacagagtggatgtcacaacctccctgcaccgaaccaagtgcagctcccaggccacaggccacccaggaaaggtccagtggcccccggaggctcccaccgcaggcctcccaccacagccggcaccaacccaggatagctgtgttctcctggcttcttttcacacgggtagcagaaagctgagatccggggaaagctgagatccagggaaagctgagaatcggcctctgctgcccggacgcccacccccagctctgctcccagctccagggcctccttctcaggtgcccttacaggaggcagagggcttgagccacctcctgggcctggggcacgcaggatgaacggggtcacggtgcaggccactgtccactgcgcagatcccaaggccataaacagcctggccacagtggcttcccagctggcaggcggccagattatttttgttgtttagcaattgattaagtttctccgctgcccccaggggtaagtggtggggcaaatgccgcaaccgcagcatttgacccgggatcctgtgccaagtgaccatagggtcacaaagcacaagggaagtggctgggcccgatgctggctctgctggaacctgaggccggccactgtcacctgcacggtgcctgggaccttccagcaagcacagagaagctatggccctccaggagcagctggcaggcaccttggcctgcagtcaggggctctgtctgctcagctctaaaacaggaaagtcgctgctctgcctggggtcagggcagccagagagtgaccaagtcagtgccggcctcaggaagggacctgcaggcgggtcccttcctctcccatccctcggtgccagccagcccctcctgtggccccccactgcctgcctctgcccccatgccccaccacaacctcaggcccatggctgcatggccactccccaggcaggcagtggggatgggatttcaccatgttggccaggctggtctcgaactcctgacctcaggtgaggagttcctaaagtgctgggattacaggcgtgagccaccgcgccagccctccctgtggtactaaacactcacacccccttgctggggaccctggtgagggaacacagcctcacaagtgaagtgtggttttgttgagcaaatgacgcctgggcagccctctcatctttgcctaaaactgaagaatttaggggcgtggatgtataaaacagttggtgacttaaatgaaaaagaaggccacactcccccctttaggcaggcggcctaattctttaaaagccagcacagggtgcctttctgaacccaggcacacagtaggtgttcaatggacagcagcggttacttgtactgctcatgacaccctgtctgtggcctctgcagctggctccagcctgacgcatggctgcgcccctccgcaaggccaccccggtatacatggaaactctgtggagaaggccttgggggccggccaggacgccaggcccagatcccatctgcgcccttcctccatagacctcagcgagctctcggcaccatgtgcctcaggcccatttaagaagtagggccggccaggcatggtggctcatgcctgtaatcccagcactttgggaggcccaaggtgggtggatcacgagatggtcaggagatcgagaccatcctggctaacacggtgaaaccccatctctactaaaaatacaaaaaataagccgagtgtggtggcgggtgcctatagtccaagctactcgggaggctgaggcaggataatcgcttgagctcagcaggcagaggttgcagttagcggagatcgcgccattgcactccagcctaggtgacagagagagactctgtctcaattaaaaaaaaaaaaaataaaaaaaagaagcagggccagccacggacgacccctcacacagctcccaggacgcgtgcctgggtatagggctcaggaccatgaccgctgcagtggcccccaagaaacgttacttttgtcacccaccccgcctcagtggcagtagccaaaataacggattagaatggaaccatgtgacaatgccactgccccaactgacagaagatggctatcagcagttcacgcggccccacctatcacaagtgcagggcactctacaacttatgcatccttccccagacaccgtcctttcgaccctcccaggtcagcaaggcacacagggcctacatttcacagccacacagcagagggctgaggctggaactcggatgctctgatttccgttcaatcacatccccagaggtggcacagagacggggggcttctcttgacaaagtcaagaaagtcactgccagctccactgaagaccaaagaacctcagctctcaaaccctcttgaaggtgttaccgaactctcccagcctgtttcctgggtcccgatgttggtcccgtgggacacaggaagaggaagaagctccctagagcagagcctggtgcacctgccacactctcagagggctgcgcacgggcggaggagccgtgtgcaggagtggggtctggatggaggggcgctgtggccgggggcagggggcaggggaagggtgctccaggtggtgggcacagcacgagcaggggcagggaggtccacactcagatgtgcacagggagaaacaaatcgtgcatttccattggaataggcggtaaaaggtagaaaaacagagtgggggccaggaagggagtcggagccttctagtgtctctctgcaggtgagcggcagcccgaggtgtcagctcagcagacttggggtccaggggccgtgtcttctatcactgaccccagggcacacggaactggggagggagagcagaggcacagggcacggtcagtgaaacgaaacaaggagtcatcaccaaatgcggaaagggcaaggagtgcccgcagccgcacaagggttctgtctgggcaacgtgggcgtcccaccaggccccgcaccctgcaagcgcaaagctcgccactgaagataaagggaagctgttggagctgcggagctggtctggggtccgcatggagctgggcttatgctgcagtcacaagggggacatggaagaggctgcaggggacaaaaccagtgaccacagtctaactctgagcctgtggaaaggcgcccacagcattcacccatcccagagatgccattccccctgtgcccccgctccacggtgacagcgttctccaggaatatgatgcgcccctctcctcttgcatcagccctgacagtgagtattcaggccaaaaagcagaagagcacagctgcgtggttccatttccatgtagttctggaacaggcaacgctaatccaaggtgatagaagtcaggagagtggtggagggggcgggggttgaggatggcaaaggggcaccgggaactttcccagtggtagaaatgttctctgtctggaccgtgtggtagttatgcagacatatgcagctgtcaaagttaatccaaatgtacacgttaaaatgtgtgcgttttattgcctgcaagttatacctcaattaaaaaaataaagttagcactcaggcttcttccacaacttcctgaaccgtgtgagctgattttcttgctattaaaaattcacggtccatggctgagaacagcagctgccttctgtttgcaaagtcaacgccaatcactgcccggccgcggcagactcggccccacaggacctcctttcttttttccctttgacctacttccctgataagtgacaagacagccagactctgggaacaaacgcccgttattcggccccgagctgagcgggccctgcttcctgagctaatccgcccggacagacggagggacgtgaggggctttgccgtcggctccagctgtcagtctgcccgtcagactcgacagtggccccctctgttcctcccgctgcccccactccatccccgacttctttttgtttcctgtccctgacagacgaacatctgttaaaactctgtctgggtgagctgtggccagcggcccacaaatccccaagccgcaccccagcctcatctgggcgctgccgggagcactgcctggccaccctctggacatagctctgagagccaccggccagggcacgtgtggcccgagtggcatggtgcacgccgctaagcccactgcccaaaggcccccaagcaggagggatgtgcaggagacaaaagtcaaaagaacaggggcacgttccacagaggatggggctggaggggtggcagtgaggaacagcagcttccgaggatggcggtggcaactcccaaataaggcctcactcctgctgtttttagctcattccacataattggaaaaacatggcagaaaccgaagccagctgctgccttggtcctggggctgtgtggagggggtggggaggccggaggcccaggctctgcactcgactgctggggatgagagtgactctgagctgcagagagcagcatcgcagccgccatggtcccattgagccccggccacgctgggcggcagaggctcgtgggatatacctgccctgtctcatgggggtcacttcaggaggggcgggggagccaggacacagcccagggctagcggtcaccctgcagctcaggggccacgtaaatagtgccaccttgaaggcacacagcagtgcggggccccccccgccaccaacgcatccctacctctaggaggccgcctgtgtgcccctgggaacgctgctccctgtcccttggggtcctggtgtgaccaccctctcagccccttccttggggaaggcacctgactccctacacccagctggctttcatttgctcaaaatcaggaaaaagcagaattcaagacatcacagaaatgtcttcgcctgtaactccatgaaagataaacggtcagacacccaggagggagtcccagggacccttgagtctcacctgaggctctggcttcaaacctcgagatgtttccagccatgctagcgccgccccccacaacctgccccacacagtcctcccttgggaactcacagatttggcccccacctgccccgtttcttctggtggagtgggtgcgttgggttggggtggggctggggactctggatgtgtcttaagagtctgagtgattctgacacagccaggccctgcccccctcctgaccttcgccccacaggaaagggagccacacgcctgaagcgcccagcacacccccctccgtcctccccaggtcacccgctggccgtgtgagccgtgctccccactgccccttcacccaccccagctcctcctggcagcacccagccttggaagctacttctgattacaaccgccgaaggaagactcgctccctcggcactgacccagacagcctgcaccatcacgctgctcagcacaacccacacagccttcctccaaaccccatggagcggggagtataatcaccccctttctaccaacggacaaactgaagcacagagaggttaagtcactttcctaagctcccaacacgatgacaaaaaatagaaggtcagcccgcaagtggaactaggtgctccaagtccccggtctgcctgacactgcacctcctcgccgccacggtcccgggtccgcctgacactgcacctcctcgccgccacggtcccgggtccgcctgacactgcacctcctcgccgccacggtcccgggtccgcctgacactgcacctcctcgccgccacggtcccgggtccgcctgacactgcacctcctcgccgccacggtcccgggtccgcctgacactgcacctcctcgccgccacggtcccgggtccgcctgacactgcacctcctcgccgccacggtcccgggtctgcctgacactgcacctcctcaacaccaccacggtcccgggtctgcctgacactgcacctcctcaccaccaccacagtcccgggtctgcctgacactgcatttcctcatcaccacagtcccgggtctgcctgacactgcatttcctcatcaccacggtcccgggtctgcctgacactgcacctcctcaccgccacggtcccgggtctgcctgacactgcactttctcaacaccactccttggccggctcccaactacaaaccaagccatgtcttccatcctgaatcctcttggcctaaacatcactcacaatgcctccctcgggaacaggcacaagtcccaccagcacagcctccttcgttacctgcgtttccgctagcccagggccagctccagagccctcaccacagagcctctatccttcacccccggacactggacctcaccaacccatagcctggaggagatccctgtgtgaccccagggcctcctctgcccgactctgaatttcactgcccaacgtgacacctcggaaggctctctgggcactggcagccctccatgggcaccgctccttctggccagctctgacatcccggctggtgaggtgccctgcacgaggcctctgcccactgggacctcacagccgtgctgtcagctgcaacaagcgacagaatttcacgttttcttcacgttgcccctgggtgagcagctccaggtagttttcagtcgaggcgaggcgtcccgtcagcagccaggcggcacagctaattcatgcccgccgggcgcacggccgcaataccaatgggcacctgcagcctggaaagccacagaggaaccgagaacagcgactgtgctcaggtgacaggactgtggtcttttaacaaaacattttcctttaacgtgatattttacggcaaggaatgaaacctggagggcaggacatttggatactaaagccccaggctgccgcgtggtctgctttgtgaagtctgaagcccgcgccccattctggccccgctcacaggtccggctctgactcaccagcttcaatgctaggccgtgcctgtcctccaaccagaacatgacttccttaaggacaaagccgtttctcgcccatccccatctccctctggattaagaaatatgggaagatcttctagaaccacctcaaatttgcagagagccatcctggtgacaaacccttgaaatgcttctaagaagagtttaggtttcttctcaactctaaaacctctagaaaactctatttccacaccagctgcccctggaacacttcagcttcaaaagggcccagggcagggagacggaggagccagcatccacaccgagcaccagcctgttaattaacgggaagcgggtggggcccatctccaggcagctctgaggtcagactggggaaccatgcttacaaaaaaaagtgaactgaaacgctcacgtcctcatgcaaaaccagactcccagttgcatctttctgtctcattgaggagctttttcctccctttgacagaacaccctacacacggcatctggaaccaaagcagaaagattcaggctcagagtaaaacagtccccacactggctgcatgtggacgttcccggcccagagtctcgcccaagcagggcctataaatgacacaaaatgtttttctcctgcgtgccagtcatgctccaactgagttatgtgtaaaagtgcctctcacggctgagggcaaaaacagttcccacaagactagagaaaggtgacccctgacggctgagtctctagggagcgtggagctgcgtgctcagccctgcggccctgacggctctggaatggaaaagctatccaactggaagggcagggctcgctgctagtccagcggtccaaccccacaggtgtctgtggtgtcagctccatgccacagagcccagggctggggccagagccaccaggccccctgccagcctgcaggggcctcctcctctgggtagcctaaccaccccctgtgagcgcaggcagcctcctctaatcaccacagggcctgtccccccctctcccccgcttgcaggaaaatgagccctgaggactccccagggctgctctgggcctggacatggagactgggaattacatttgcagaaggagcgcaatgcccttgaagggctcagccacgagcagccagtccccagggctcagaaggcccagctgttagaaccctgggagccagcaaagagccaggggctccacctaagtctatagcccctgcctcttctggttgggaaagaaatcaacgcccctttactggctcccactgacagcccactcccccaggtatgggaggattctgggacgatgcaggcaaacctggaccctgagtgaacctgccccagctctcacgggcctggcaccagccacagcacctaaggcgccggtcatggtgacaacatgaaggtgataagggcatggacagtggacatggcagctggacactgggcacccactggatgccaggcacccagcacggctccgtcacccctggatgagcagtggccctttgcaagccagggtagcctgggcaagttatttgggggtctccaagcttgtccagctgtgcgacttcactgagccatgagtctgggattttatcagggcccacacccgttcctggaactctgatacgtgagggagccacacagggacccttaacaaaagctcccagggcaacatgttctcttgcctcagtctcccaaatagctgggattacaggcgcacgactaccgcccggctaatttttgtatttttagtagagacagggtttcaccatgttggccaggctggtcttgaacccctgacctcaaatgatccttccactgttagggcaaggcacctgacaggcacgactgcacgatctgcttgttgggggctgtgtccattccccactccttcgacaaatgtccacacccagccttgctttgacaccccaagaacagagatggtgacacctgcttcctacatgcccattgctctcccaaggcagacatccccagcagatgcaacacagtgtttaggcagacatcaccaatcgatggtggcaacagacaccaggccctgctccctctaactccagtggccaggccccaagccagctctcacctgcccactcccaacccacagcagcaagactcagaaatggcaaaaacacaaagagaacagaaacgccccatagcgggaggatgactaaaagacatgtcttgataagatattgttcaggcataggccaggcacagtggctcatgcctgtgatcctagaactttaggaggctgaggtaggtggatcacctgaggttaggagttcaagaccagcctagccaacatggtgaaaccccatctctactaaacatacaaaaattagccagacatagtagcgggcgcctgtaatcccagctgcttgggaggctgaggcaggagaattgcttgaacctgggaggtggaagctgctgtgagccactgtactccaacctggacaacagagcaagactctgtctcaaaaaaaaaaaaaaaaaaagatatccttcactaaaactcatgtctttgatacatatttacctcctgcaatcgcaaatgcttctgcagtgcataaagtgaaataaatagcaggaagccttacggttcgatcacccacacagacacacagtcacatacaggaaaaacgcagggagggctggggaacaaaaaaacagaagataaaatgtggagacagacacaccaagagagtaagagaccacctccagacctcccttcagcttctcaaacacacgagccgggcccgttacagaatttgcggggaccgctgcaaaatggaagtgcagacagccccttactcaaaaggtaggaatttcaggtcaacaacagagctcacctcatatgactacacaggtcacacagcccgtgaagtcggtcccaacaccagcatgctcctgcctcaaagccgctgcacgtgctgttccttctcgcctttccctcttttagtccttcagatctcaggcctcctgagagagacctctgacctgccggctcaggcggccacacccccagtacaggagtctccggctcagcccctgctgtgttccgtacccgatccaggtctgtcctatgtccatctgtgtgccggcttgcttcctgacatggcccccaccacacgtgtgcctcggggcaggggaacaggcccgtctcattaactgctttcttctcagatattttctggaatatttgtggatattgggcaacatatatgctccacctttttcagactagccaggacgagctgcatttttttttttttttttttgagacagggtctcactctgttgcccaggctggagtatagcggcatgatcttggctcagtgcaacctccgcctcctaggctcaagcaattctcctgcctcagtctcccaagtagctgggattacaggcccgtgccactactgcccagctaatttttatatttttagtagagatggagtttcaccatgttggccaggctggtcttgaactcctgacctcaaatgatccacctgccttggactcccaaattgttgggattacaggcgtgagccactgcgcccggcccgagctgcctgttttacacctttgccatattccggtgattctctctcccctccgtcccccggccctgactgtggtggccactccctgccgtcatgagcccgtatgtcctcactctttccctttccgccaggacttcaaccaacactgcagagcgcagggtccagctccagcactgagttcagcctcttctcaccaacagacaggcaggaaagaaaacaaactctgagaaggccaaggttcccgggcagccagcaagccaagcatccttctccgctgaggcttgtgcagccgaggcaccccctcctccagggagcaggcagcgtcctggggcagtctgcgagggagaccagggcccttgctccaccagggccccaggtatgggggcagcagcaaactcatggctctgggagccagaccccacctgctagaacctactatgccacctgctgtgggcaaccccaggctggtgacttgccctggcctcctctgtaaacaaagggctcatccaacctggtcaaaccactcctccccttcaagggtctataatcctcccttaacctgcttggtccaaacccctggtgtcgccaggtcactcaggaggcagctcatctggactccttccctgggtccagtttctctctcaacattgcctttgaggccgaggtgaacggtcaacagcgaagggccccagaggtgatggaggagcgggtgtccaagacactcaccctttctaatgcactgactccctcgtggactcacttgtgccgtctcccccacccacccagccccagagcccagagtgcgagcgccagaggcccgggattctgtctgcaccgcggggtccccagtgcctcggagcaatgccagcacccggcaagtgttcgacaaatgcctgctgaatgagcaaatggatggatgaacgaatgaatgagcaagcagatgaatgaatggggtgctgtccagagccgtgaggactaggccgcccaagtccccatttctcaaattctccttctcccgacttgggaaacaagatgcttggtcggggaggctctccaaccatcccctgcagcagccggcacagcggacagaccctttgatgtaacagccatgtcttcattaaagatgccctgctctcagaaagagaaagacaaatacaaacctggaaaatcctcaccaaacgcaggacccctgccagggagcagagaaaagacccacacgccacgggcgccacgaccacacacacaccccagccgctgcacacaaacacagaccctagccagcaagaacagggggaccaggaaactgttcctaaagtcaggacccccatgtgctcagacagcagtgagagcaaggacacttctccatccaccggatgccaggagagtccttttagggggccccacaccgagactctgcccttaggactgttcctgagtgtggaagccagcccacttggaagccccctgccctcccgagtgggacaccggcacaggaagcaggccctgtcccccaccactttctgcaagctgggccccatcacgctacagaaacggggaggactggtcccagggatggcgctttcctgacacctctcgttaccccctcgcttgccaggccccagggtcagccccagaggccagactggctatcccaggcccgggagcatccccgaaggcgagctgcatcctgaacgtgtgtgatttcccgaagggcccgccccgaaccgacacctggaaagaaagatcctcagccggtgccccagaggagaagagccatgcctcactgcaacacagtcccaggaagcaccaagtgcctgaggaccaaggcggagagtaaaaaagtggaaaatatctggggcaaaaataaaacaaaacaaaacaggattgacctcctgggctcaagcaatcctcccaactcagcttcccgagtagctgggaccacagacttgaatcaccacacccgccaagtggatcatttcgaacgggtttgccgaggttccttctggggcacccccggcggccgcaacccattcccgccaggccccgccccgcccgcccgccccgtcccgtcccaccgcctcacctgccttacacgtcctgccgttgtcctgcagctgcacacccgtggggcaggcgcatgtgtagaaaggctcgcttggggacagcaggcacaggtgggagcagccgccattgtcctcctcacagcgagtgtggactgagaaaaccaggacagactgagagaaggttccagaagaggaccgtcacttgtttctgaatgagtcacatcctgcctcgtcccccgtgacagcctccagtgtgtccctctgcccaaacatcggcctcaagtggcatcagggacctccccgcgggcaccattccacctgcctcatcgctggccccgtccacatggggccctcagcctggccagacggcctgcaatttccccaaaaccagccgtgaccttcctggccaccctcacacccagatgtgacctgcccatggagtgacatcctccccatctgcttcctcccaccaagctcctatgactagaacaccctccccagctcctcggagcccccaaaggacacccctctgcaaaggctgccccccacgctccaatggccggggtcaggacctgcctgtgtggtagtgacgggaaccccagagacaatgggctcctgggcaaaaggcttgtcttgtctttgtgctatgtgtggacccagcagcttccataggaacactgtccttcttgctgggatggccaagcttgtcactctcccaagccctcctatgaccaacagcaattgaacggaactcgataaatgcttccagcacctcattcaaaccaggggaaagctgggtgtagcagccccaaaatacggatataactggaacaacaaactcatcaaaatgaacctctccctccctcatgctgccccaagtgtagatgggttttgtgaccacgactttctcaccaggaaacagctccagagagccccaccctcctgtgtcctgctctgggaacagctggcacccctaggccccacatttcaattcaaagtccaaaccttccataatggcctggccagaaatctccatccctggtccctgtgggagtgggccactgtccccagagccgcagccccactgtcacagaagctggtgcatttccccatcagggacctctgtcacaacccagcgtggcccccaggctgagaactgctgattctgggcagattattcattgataaatacgcgacttgcagggccaagcatggtggctcatacctgtgaccccagcactttgggaagtcaaggtgtgaggatcactggagcccacgagtttgagacaagcctgggcaacgtggcaaaatctctcatctctattaaaaatacatacacacacacacacacacacacacacacacatatatatgtatatataaataaccatatatatatatacacacatacgtgtatgtgtatataaatacatatacacacacacacagacaacttcttctgggccttgaaaacgaggcaaccttccttggaaatccccttgccactgctgagcctgaaatagcccccatgagctctgcagaggggtcctctgcaggcccgtgtcccccagccagccacacacctccctccattgcagcaggtacccctttagagagggggccccccagagcatgggcttctgcagggaggggtcacctgcccccccaccccacccacgcccgcgcacccccacgcccccgcatcctcccactcccctgccccgcgcccccgctccccccagccccctcaccctctcccccgtgccccaaccggcactcacaaaaaggctgccgctcctggctcagcacctggatgtccatgggtgagtatagggcactcaggatctccttcctcttccccccagtgcgcttgttgcaggcatggatggagcgggtctgccagtctgtccagtacagagtgtccccggagagcgtcagggcgaaggggtgcgtcaggctgccctccaccaccttctgcctgcagtcagggaagcggggtggaggagccatcaggagggtcccccgacagtcattgctgctgacccaattaatttctttttttttttttgagatggagtctcggtctgtcgcccaggctggagtgcagtgatgtaatctcagctcactgcaacctccgcctcccgggttcaagcaattatcctgcctcagcctcccgagtagctgggatcactgatgcccaccactacgcccagatgatttttgtatttttagtagagacagggtttcatcatgttggcaaggctggtctcgaactcctgacctcaggtgatccacccacctcagcctctcaaagcgctgggattacaggcgtgcgccaccatgccaggcttcccatttgctttcaaccagacaagtgaggccaggtcaagagccccaggagctggcgccctcgtacatttctcccggcgtgcacagggcacctcccaaacacagcctgtgatggtgacacacgggctcccccaggtcaagtggcaaagtctcccccagggaagaaaggaggaagccatgcctggcaaaaagcacacctctcctgcccaacgctttaacctctgtatacaaatcaggccatgtgcactcgctccttcttacaatgctcataatttatactttcagagtaaatgaaacttggcatcaacccgagaaacagctattcttttctagatgcttacagtgcccagcaaatgaggactcgggtgtaatgagattatggacactggaaacaggatcataatgtgacgtggtcggtaatgtgcagttttatttgcttaatgaccctcgccccgtgacaggctccctgagggtgggcctgggggcagaggtccccgccacgtccccagccctcagcacagttgccaggagagggtgacactcatgaagtggcacagggaagatgggagctgtgggctctgcagatccaccacctcttctgttcatttttgttgatgctgttttttaagaaaattattgaagtaaaattcacaggacatacgtttacttttttttttttttttggagatggggtctcactctgtcacccaggttggagtgcagtggtgtgatctcagctcactgcaacctctgcctcccaggttcaagcgattctcccacctccgcctccagagtagctgggaccacaggcgtgcaccaccacacccagctaatttttggggggtatctttttggtagagacagggtttcgccatgttgcccaaggctggtcttgaagccctgagctcaggcgatccacccgccttggcctctcaaagtgctgggattacaggcataagccactgcacccagcctaaatttaccactttaaagtgaatagtgttacctagtgcattcgcaaggcggtgcagcctccacttctgtctagttccaaagcacttccattgccccacaggcaaaccccacacccggcagcagtcatgccccagtccccgcccccagccccggcaaacacttttgatggacttaactacacacattctcaacatctcatataaacggaatcacaatatacagcctctgatgtctgtcttctttgacttggcaccatgttttcgaggttcatccaggctgtagcatgtcagtgcttcatcccgttttaggggtgaaccatattccagtgtgcagacagaaaccaatctgtgcatccattcacccactgggggacctttgtgtcatttccaccctcggctgttgtgcacagtgctgctacggacattactgtccattcacattttgtgtgaagacctgttttcgattcttaagagtatacagctaggagcggaattgctgggtcatacgtaaatcaatgtttacgtctcaaggaatcaacaaactgttttccacaatgttgtcttttttgtttgttttctgagacagggtcttgctctgtcacccaggctggagtgcggtggtgtgatcatggctcactgcagcctcaatctcctaagctcaatccatcctcctgcctcagcctcctgagtagctgggaacacaggtatgtaccaccatggccagctaattttctaattttatttttttttgtttttgtttttttgagacagagtctcgctctgtcgcccaggctggagtgcagtggtgccatctcagctcactgcaagctctgcctcccgggttcacaccattctcctgcctcagcctcccgagtggctgggactatagtcaccggccaccacgcctggctaatttttttgtatttttagtagagatggggtttcaccgtgttacccaggatggtctcgatctcctaacttcatgatccacctgccttggcctcccaaagttctgggattacaggcgtgagccaccacgcccgaccttacttttaattttttaattttattattttattttattttttttttttttgagacagagtctcgctctgtagcccaggctggagtgcagtggcgggatctcagctcactgcaagctccacctcccaggttcacgccattctcctgcctcagcctcccgagtagctgggactacaggtgcccaccacgatgcccggctaattttttgtatttttagtagagacagggtttcactgtgttagccaggatgatctcaatctcctgacctcgtgatccgcccgtctcagcctcccaaagtgctgggattacaggcgtgagccaccgcgcccagccttttttttttttttttttttttttttgagatagagtcttgctctgtcgcccaggctggagtgcagtggcgggatctcagctcactgcaagctccgcctcccaggttcacgccattctcctgcctcagcctcccgagtagctgggactacaggcacccaccaccacacctggctaatgttttgtatttttagtagagacgaggtttcaccgtgttagccaggatggtctcgatctcctgacctcgtaatccgcccgcctcggcctcccaaagtgctgggattacacgcgtaagccatggcgcccagcccatgtggccatttttcagtgagagaagccagaggcccatcactctcggttgctccctgggccatgctctgcctcagccagaagcactgagggaaggtcagcctcggcccttgccccagccacagtcacagataaaggggcctgcacaggtctgtgtggctccagagctcgtcacccaacacacgacgcttccatgtgaatagccccaggtgcatcatgaagagcgatggccgctgcagaggcagaagaatcccgcggggaagcaggtgggagagaggctgagaacagaccagaccctggagctacagaccctatgttccaaccctggctgggactagctgtgtggctctgggcaaattcacatgcttctctgtgcacaggggatcaaaatagcaaacacaggctaggcacagtggttcacacctataatcccagtgctttgagaggccgaggtggacacatggcttaagctcaggagtttgagaccagcctgggcaacatggtgaaacctcgtctctacaaaaaaaataccaaataaattagccaggcgtggtggtacgtgcctgtggtctcagctacttggaaggctgaggcgggaggaacacttgagcccaagaagtcaaggctgtggccgcgtgtggtggctcacgcctgtaatcccagcactttgagaggctcaggtgggtggatcacttgtgatcaggagttcaagaccagcctggccaacatggtgaaaccccgtccctactaaaaaaatacaacaatttgccaggcgtggtggcgggcacctgtaatcccagctacttgggaggctgaggcaggagaatagttagaacttgggaggtggaggttgtagttagccaagatggtgccgctgcactccagccagggggacagagcaagactccatcccaaaaaaaaaaaaaacaaacaaacaaacaaaaaaagaggtcaaggctgcagtgaaccatgattgtgccaatgcactccagcctgggtgacaaagtgagaccctgcctcaaaacaataaaaatataaataaaaataaaacataatagcaaacgtttcatagaggtggtatgagcattaaatgaactgataaacgtccctggaaaacagtaagtgctatggaaggattcgctgccgccaccgccaccaccattagcatgtttcaacctccatcaccctcactgtcccctgtcaccatcctttgaccagggcactcccagctgcagcctttctatcctcttgtccacccttcataactgtaagatcactcagctcccaagaaccacagtctacagggtaaccacatttccaaatctcaaaccagacccgctggtctgcacttccagggacaacaggatattttcaaaccagcccaaaagagatgtgtggctcagcataagaggaacaggagaaactgaggcctcttgccctgagaatgagcttggaagtggatgtcccggcctcactcaaaccttcagatgactgaggcccagccaggagcttgagtgtaccctcaggtcataccctgagccagaagcacccagctaatccactcctcatcactgactccctccccataaaaaacctgtttgctgtttcaggctgttaagttgtgggctgttttgttacacagcaatggataactaacacacgaggcctggcaagtgtggagcaaagctgcccaagccctcaagtctgttcatgtgggtgttggcctgtgtttgcagaaatccagccactgagtcctcccatgcagtcactactgccctctgcacagacacctgccacatccctgcctgggccaggagctccactagtgcaggaatggggtctgccgtcccaggaggatccctgacacctagcacagggctagcagcaggcagcacttggttagtgaataaactgcccttcacctgtacacagaagggatgtttctataaggggtaattaagtacagagctgggaagctatgctgaccagaaggctctaaaagcaattaaccaacgaggggaaaacccttcctactcattctcggcccattttattgagcactgaccatgtggaaggccccctggtgagactggggaatgcaccaataactgagacagcttccggctgttgccctcaggatgcctgagctgggatagggccagggtgggggtggtgcgtgtgacagggttactgttcacaaccctgccgggccataagccctccccaacaattccaaaatccaaaacgctctgaagatggaaagcttttgttgctcatctggtgacaaaacctcatttggtgcatgggccgggtgcggtggctcacgcctgtaatcccagcactctgggagccgaggggaaggatcccttgagcttaggagtttgagaccagcctgagcaacatgtgagaccccgtctctaccaaaaatacaaaaattagccaggtgtggtggcgcactcctgtagtcccagctactcgggaggctgaggcgggaggatcgcttgagcctgggaggtgggggctgcagtgagctgagattatgacattgcactccagcctgggtgaaagagtgagactctgtctcaaaaaaacaaagttaaaaaaaaaaaaactgtgcatgggtgtgggctacagatagtcttttctgccctacttagaatgaacgtgccacatttgctatagaaatattcaagggctggtggcaaatgccacacagaccctgacgctgttccaagttctgagaagtcctgcattcctcagggccccagagtttcagagaagagtctgtaggcctgagttaagaaggaacgccttcaaaagccctggggacaaaggggaaaggggtgccccaggactgcgtgggtacctaccggaacgagccgtccaggttggcacggtggatgaagctgagcttggcgtcagcccagtagagcttctgctcctccaggtcgatggtcagtccattgggccagtaaatgtccgagtccacaatgatcttccgggtgctgccatccatccctgcccgctcaatccggggcgtctcaccccagtctgtccagtacatgtacctgtgacgggggcagggcaagagaagcagctaacacagatctgttttttgtttttgtctgcatagatgcagacatgaaacaacagacagtgaacttgccctaaaatctcacccatcggaaataaccaacaggtatggtttcaggtattcctgccttaagctgggcaatcaaaatatactatttccaacttgttctcagttaacagtaaattctgggcaccttcccttcttgtggatagaaagattccttgttcttttgatgattgcctagtgtactctgctgtaagttttttaaagaacttcaggttatttctgatttttttgctaccatgaaaatgctgtaaatgaacctctaaaaggcaattcaaaacactcaggatggaatattatttagtggtataaagaaatgagctatcggctgggcccagtggctcacacctctaatcccagcactttgggaggccaaggcgggtggatcacgaggtcgggagatcaagaccatcctggctaacacagtgaaaccccgtccctactaaaaatacaaaacattagccaggcgtggtagtgagcacctgtagtcccagctacttaggaggctgaggcaggagaatcatttgaacccgggagggggaggttgcagtgagcagaaatcgcaccattgcactccatcctgggcgacagagcgagactccatctcaaaaaaaaaaaaaagaaaagaaaagaaatgatctatcaagccatgaaaagacatggaggaaacttaaatgcatgttagtaggtgaaagagccaatctgtatgagtccagttctaaacactctggaaaaagcaaatacacagagacagtaaagcatcagtggttgccaggagttggagaggagagggatgaatgagtggagcacagaaaatcagggcagtggaactatcctgtatgacatggaatggtgggtgcatgtccttactcatctgtctaaaccaagaatgtacaaatcaagggcgaaccctcgtgtaaacgtggattttgggtgatggtgcgtcagccagctttcatcagttgtaacaaatgtaccaccctgcacaggatgctgacagttgggaaggctgtgtgggtgtgaggacagggatgtataggaactcagtacctgctgctcatcaattttgctgtgaacctacaactgtttgaaaaaattaagtctatttaaaaacaacaaaacatggccaggcacgatggcttgcacctgtaattccagtacttcgggaggctgaggtgggtgggtcacttgagccaccctgggcaacatggcaaaatcccacctctacaaaaaataaaaattaaaaaaaagttagctgggcatggtggcacactcttgtagtcccagctacttgggaggctgacgtgggaggatcccttcagccctgggaggtcgaggctgcagtgagctgtgactgtaccactgcactccagcctggatgacagagtgagaccctgcctaaaaaaaaaaaaaaaaaggctgggtgcggtggctcatgcctgtaattccagcgctttgggaggccgagatgggcggatcacgaggtcaggagatcgagaccatcctggctaacacggtgaaaccccgtctctactaaaagtacaaaaaaaaaaattagccgggcatggtggcggacacctgtagtcacagctactcgggaggctgaggcaggagaatggcgtgaacccgggaggcggagcttgcagtgagccaagatcacaccactgcactctcagcctgggagacagcaacactccgtctcaaaaaaaaaagaataaaacccatggctgggatggaccctgaacctgcagctgcagctgttcctgggtaggtctgtgggcgacgtggctttgcttctccatgttcccaagagacaagcatcacccatccatgagaaacaagcacatcctcagggcgcccttacgtgatctctggccaatgaaccaagacaaagtgagcagacaccaggtctgggatggcaggtcccacccccaccagtgcccagtgtgccctgtttggaggtgaccacagggtgtgtgcccagaggctgggcgtgactctcagcggagaccagaggggaaccacaccagcttggaggactcagttcccatcccagccagctgggatgagccacaggacacaagggctggcagacctattgtgttttgtccacccttcacagcagagaaaggggacagtgcccagaatgtcctctgaggagcctcctcccactcttggtccttgtaaaatggtgctgactcccttgctcccttcttcctggggtgggcggcaaaccccattcccctcagccttagcaagtgatttagaaacaggcagctcgcccaagccaggcatgagagtgatcccgggacacagggagaacaagccccgctttgccctctgggggtctccattcagcagaagaggcaaatgacagacacacagccgcctcctcccccaccatggtgctctgcagcctcaggagcctcaggtgcaccaagggccaccccatccagggggccatgcttccttgagtggtatcgttcctgagcgagtaccatctccaccttccagaggggctgtgacaagatcaacaagaatgagggcataggagcctcgaaccaaacatgccctcttccctgcagaggctgactgcgcccagctgctatcaccaagcccctgctcctccggccccgtggggacagggtaagaggggtgtcacatggaacagctctccaaacagtccctctcaagctgctgtctcctgtgcatctagtgagaacccaaccaacaaagggaaggtgggaattgctattcccattaggcagatgagaaaactgaggccccgaaaggctggcctgttccaggttacaggcgctgagcggctgctctgggaacacacttggtgtctgctgagggcccgagcccggccatcatatgactcacccttcgccagcaaagcccgggtgtgggtgaacttttcctggcagcctgggactccaaggtgctggcagccagcccagggaaggctcccgcgtgcctgcggcagacgccttgctttacctgcacgtccccacccctaggagcctggacagagcccagaccctccgccacctcctgagaaggtatcaggggcatcagtctggacttgggggggaatccacacaggccttccccaaatgctccaccgtggcccatggaaaaggctggaaaacgtgcaggagcaggagcctccgcatggagcataattcacattccttccccgagtttcataacagaggcctgctggtttccttaaatggggaatttgcgagccagtcggtgaccagagactggttggcgtggacgtgctcttgcagagtctcaaacgctaccacaagcccagccaaattccacggaggaaaatcgacttccgaagaaaagagctgcagcatggccttcgtgcagagccagctgcggttgtggttgtgtgttattttagggaagggccattttgcattttaaagagggggttgggtttcaccctggctttaatttgagacccgggggccactgcagccccttgtcaggctggtacaggccggggactcctcccatgctaagccagtgtctttctggccccagatcctcaggggccagagggtcatccccagagcccgctctgccacccacatgggtaccctgggcctgggagggatgtgccttccctcaaccctgcctggatgtccgcacggggccacctgcattgctgaaactgcaacgaagtcgagtctcaggaggggcccccctggctgcagggctcttgatccttttggccacgtgcacactgaggtggacgctcggacccagagacccccttcatgatgatggccggggcaggaaccccctcctctgaggaaggaccctggtgggggacagcactgcaggagggcacaggagatgacgggggctctagcagggccgggaggaaggccaagatgctcctcgcaaccgtgtgcctgtggccaggacagaggacaaacccaccctccactgtccccactctcaggacagcagtcctgccccaggactcagcgcccacacttatgcctgaggaccactattcaagtcagtatttggcgagcaggggttgctgccgcgggcgctgtgacaggctggaatcctctccctctccctctccctctccggagacatggagcctacagggacagagtcagcacctcagggtaggaccatggctggcgtcatcagcatcactggatctgatgagtgggagccggcatctcactgttttcactctctcattcaaatgactggagcaaagggaaggtgtggggagaggcccaggaatcaacactaaggtcaactttgcccccaggggcaggggtgggagtgaacagccacaggtgtgatcctggggagggcttctgggagagaattcagaggcaagcatgtagaggaaccatttcaaatagttaagaaaagccagagccaaacagggacagttggctcgcagagatgatgcaggcaaagccagctcagatctgagcatgggaaagactactcccaaccaagggcccagcatctcccaaccaagcaccaagtacctcccaaccaaatgccaagcacctcccaatcaaatacctcccaaccaagcacctagcacctctcaactggacaccaactactcccaaccaggcaccaagtacctcccaaccaagtgccaagcacctcccaaccaagtaccaattacctcccaaccaagcgcctagcacctcccaactgagcatcatgcacctcccaacagagcatctagcacctcccaactgatcacctcccaacctagcaccgagcacctcccaaccaagtgcagagcacctcccaaccaagtgccaagcacctcccaatcaaatacctcccaaccaagcacctagcacctctcaactggacaccaacaactcccaaccaagcgccaagcacctcctaacaaagtaccaatcaccttccaaccgagcacctagcacctcccaactgagcatcatgcacctcccaacaaatcacctagcacctcccgactgatcacctcccaacctagcactgagcacttcccaaccaacatagcaaaagccataaagaagtaaaaagacaaaaccacgtaggcatggagactggacttctggtggcgaggaaagggcatttttattataacgacagctaacatttgttgaactcacaaactgttcttggtgttttcctcatgacatgcagcatggtcacgcctctgtacagacaaggatactgaggcacagagtggcaccgtgccaaccttgtctcatctttttatcgaacctacatgcagagtgccagcaaatccagctgtcttttctcttcagaacagatcccaaatctcgccactccttacccccacaagtgaggtgtccccgctgctgctttctgtcgccaggatcccggtaataaccgtggagagggctcctgcccccacgccacccaccccacagctcactctcgctccagccaccaggggatgccttccagcacgagtcagagctggcacctcctctgctcgagacctcatgtgtcctctcctcacaccttgggccctgtttccctacattctgctacagcccctcaaacaggccccgccccaaaccagcccagggcctttgcactggctgatccctctgcctggaccgcgctgcccccagacagccacacggttctcagcctcatctgcttccagtctcgactcaaaagtcaccaagaggccttcccagcacctgagctccgacggaagcccctcgccacagcacccaagcactgctttatccccctacgcacacgtccctttcaaatactattcatttaccatctcctcccactcactgaaagggccagagactgggctatacccgctgcgtggggagcaggaccaggcgcaagggctcacaaatgcagtggatgcctggttgggaggtgagggagctgcagcgacccacgctgggagggaacgcaatgacaggaggagcgcaggtcctggcgacacgatggccatggcagccgctggtgagcaaccgcaggccggccctgggagagggcttctagcaagctgctatcttcagcctctccgactactgcagatgccccctcctagccagagacactgctacaccagccgacccttccaaaaagaaggtcagtaaccccgcgactcctggagccacagtgcagggggagagggctgagagggcaacagttcaccaagcggaacagaggctgccccggaggtcagctggctccccggcagctgcaggggtggctagcccactcggagggcagcgagggcatacgaggggctccagggatgagtggttgcccagcacagcacccctgggaggccgggggcacttctcaggtagtgggggcacgaggctgctctggcctgacctcagggactcaaaatactttggcgataaattccaccgtgtcccacccctgctggtaccccatacttacacacagactggttcagatgcagacactctcgcgcacatactcgctcacacgggcacatacacgtgcacacacagtcacatgcgcacactcatacacacacaaatatccactcacacgcatgcatgcacacacacggacacacacaggctcacacgtatgcacgcatatgcgtgcacacgcacacacacacacacacgctcacatcctcccactcccacactcagttgctcagacacacacacgcctggctctcacacaaacctgttgggctctgaaaggctccagcccttcccatgctcgtcagaagccagtcaatggcttcctaagtcaccacacagatcaaagaggtgaacttggccacatggcactctgcttcctgagctcccaaacaccagccttggtgaggacagaccctcaccccacaccctcattcccactaccctgggcaggcccagaggaggggcatctgcaggatctggcaaccagcccctcccgcccggctcctgcagccggcaccatgggagtcagggggaggtcactgcaaagggcaacagcaagttggtggccccaggactagagcccaggggtcttcagtcctactccagagcttggacactgtcccacagggcatggccaagggaagggcttccagagccctgacttcagggaggagggcaggcgggctcctgtggcaggcctggatgcatggccgcccactcctgggactttctaacctagaatatctaggtcaggctgggtgcagtggctcacgcctgcaatcccaacactttgggaggccgaggagggtggatcacttgaggttaggagtttgagaccagcctggccaacatggcgaaaccctgtgtctactaaaaatacaaaacctagccaggtgtggtagtgcacgcctgtaatcacagctactcaggaggctgaggcaggagaatcacttgaactcgggaggtggaggttgcagtgagctgagatcgtgccattgcgcaaagaagatctaggccggcccctcaaccggtgaggtccaggctgggagtgctgagagactgtggtgacactgaatgaactaacaggcaaagggcttccaactgagcctgggggtggtgggaaatggctcttgtgttctagtcaagacctctgccaaccagttctgacactgacccagcacagaacctgacaggtcagcaagggccagggcttagcacagcccaggtaagggtgtgtgtacggcccccagagtcactcccaggctgcaagaaaagggacaaaggagggacaaggggtggccaagcaaactgttccctctgctcgggagtctggggtgacctggcctagctggccagtggagctgggccacctccccttaaactctccaccccggacttcgactccaaagctttcctgccacccacgctctccccacctgggatcacggccaggccctgagccttcaagggcccaggtgaactcagccagactaggagctgaggaggacacagggcagcttccagaacggacccgagaaccactcccagcaggttctgcttccagacaaggagctgcactttttcagccaatgcaattagaaagccaggagaaggtgcaaattccacctgcctgagcgtccgcacttcccaggccgcccaccatacacacagcaaagatgtgtttaaccattcaaacccatggccaaccacatcggttgcctcagacatgcaagttttaaaaaggaacataactatgggccaggcacggtggttcacgtctgtaatcccagcactttgggaggccgaggtgggtggatcacctgaggtcaggagttcgagaccagcctagacaccatggtgaaaccccatctgtaccaaaactacaaaaattagctgggcgtggtggtgggcgcctgtaatcccagctacttgggaagctgaggcaggagaatcacttgaacccgggaggcgaaggttgcagtgagccgagattgtgccactgcactccagcctgggcaacaagggagactccatctcaattaaaaaaaaaaaaaaaaaaaaggaacataactatggagtctcaaggggaagtaattccttcaacaataacaaatcttgaaagctgagctcttttttttttttgagacaggatctcctcactttgtcgcccaggctggagtgcagtggtgggatcacagctcactgcagcctcgatctcccaggctcaaatgatcctcctacctcagcctcccaagaagctgggattacaggtgcataccatcacacccgattcatttttgtatactttgaagagatggggtctcaccatgttgcccagtgtggtcttgaattcctggactcaggtgatctgcccgccttggcctcccagagtgctgggattacaggcctgagccaacacccccacgggttcattttcagagtcgcaccgagtgctggggttacaggcctgagccaacccccccacgggttcattttaagagtgacaccgagtgctggggttacaggcctgaaccaacccccccacgagttcattttcagagtcgcaccgagtgctggggttacaggcctgagccaacccccccacgggttcattttaagagtgacaccgagtgctggggttacaggcctgagccaacacccccacgggttcattttcagagtcacaccgagtgctggggttacaggcctgagccaacccccccacgggttcattttcagagtcacaccctttttctgaaaaacaacttgggctcatgcaaattcgagagagagatggtgacactccccgccccctggacccaggtggagtcgcagcagggtttacccgtgagcggggtccaaggcgatggccctcggctggtcaaggtcctgccagaagagcaccttccgggatgtgccattgaggttggccacctcgatgcggttggtctctgagtccgtccagtacagcttcttgcccacccagtcgcaggcgaggccgtcgggagagaccaggccggagatgaccacgttctgcacggcggcccccgtctggttcaggtaggtctgcttgatggcctcctcgctcacgtctgtccagtacacggctcccttggaaaactggaagtccactgcggccgcatcctccaggccgctgaccacgatggtggactccagcttgactccgccggcgtccaccagccgtacgtcccggcggttggcaaatagcaggagcggcgaggctgtggggcagaagcaaaccgtgagggccactggctaagccagcaagatacacagccctgggatggagcactatgcccagagcactcctggtactgccctgcccatgcccaagacctccagttccttcctcccacccctaaggcgttgtcaggaagttgcctgggcagccccggcccgcatcattcagaggctcctgcagcgcagcaaacagccttcttcccacattcggtgacagcacctgtttgtttaccaactgttacgtctgttcccccagatatgggtgacccttcctgccatgcccaaaacctcccacatcgtcctccagaggctacaggggccctgtcctgttctgcagagaagccacatcccctttgttggcctgacacaggggatggggacatgcaggcacagcactggccatgctgctcgctacagacccagccacagggccacattttttgaggggttcagagcccaggccagacagagcctcaagattcccttacaagtctttgaccactgtccaagctcaggcccgtttccttggccgtggcatcagcttcccatccacccctgtattccatgtttctcccaccctgcttctggacattcctacatttaaagggtcactctggaatgccaccccttggctcagacaccttccacagctccctgtgccagtgccatgcagaacaaggtcagaccccctagcctggcctccaaggccttggcctctggcctcacctacacttctctccaccaccccaccccaagcattcctgatctgcctgcggccaggctggctccctcacctccctgtgcaccgcagccctcagccccttctgcctgtgcaagaagcctcatctcacagacaacggtctcattcccacaacgggctcaatgagaaatcaggagaggccttcagaccatcaccccaccagacacctcagacgtcggaccaggagggtccagcaacccccaacacagactcagagggactaagaagccacatgaggagtgaacacaagatgtggacaggaggaggttaagggcctccagggagctccatcagtccgtgttctgctgtcagcagggttaggctgggctggccacaaacacccccaaaaaacatctgaagccttggcttgaaacagctgacattcctcatgaaaactgcagacccctgggtcctcctgcgcagatgggggagcccagccaaccccacactcccaccttcaccaagaaagagaaagccaaaacaaactcaactcagccaatgacaatcacagaactgaatcctgtagttagttcagttggtttcatttcagcaggggaaagatttgcagcctctatgagggtagctgggaacacaaagggccagagcatggcccaggagaccccagcgcagtggggtagatggttccgagcacaggcctccctgccaagacaagcactggctcaaatcctggcccctcccattcccaggagacatgctccacaggatgggaggacacacagaggacctgaggccaggaaaatgacagcggcgcctccgccgccccacccgtgctgtcatcatcttaggtctacagttctttgtggcaacgagggacactgtgaaagtcaaacaacaggaaggcataggccacaaataaagacaaacgggacttcatgggaagctaaagattttgtgcatcaaaagacactatcgagagagtaaaaaggcaacccacagaatgagagaaaatatttccaaatcatagatctactaagagattaatatccatgaaatacagagaactcctaaaactcaacaatgagaaaacaactaagccaactcaaaaatgggcaaacaacttgaacagacatttctccaaagatgacatataaatggccaataaacacatcaaaacaggcttaatatatccctaatcatcagggaaatgcaaatcaaaactacaataagataccatcttgcaccaattaggacggctactatcaaaaaaacaaaatagcaagtgttggtgaggatctggagcaactggaacccttgtgcaccactggcaaaaatgtgaaatggtgcagctactatggaaaacagcatggcagttccccaaaaacttaaacacagaattaccatatgacccagcaatttcgctttgggttatatacccaaaagaactgaaaacagggacacaatcagatatgcatacaccttggatcacagcagcatccttcccaacagctaaaacatggaggcagccaggcatggtggctcacgcctgtaatcccagcactttgggaggctgaggcgggtggatcacctgaggtcaggagttcgagaccagcctggccaacatggtgaaaccccgtctctactaaaatacaaaaattagctgggcgtagtgacgggcacctgtaatcccagctactcacaagtctgaggcaggagaatcacttgaaccctggaagtggacgttgcagtgagccaagattgcgccactgcattccagcctgggtgacacagcgagactctgtctcaaaaaacagcaaaacaaaaacaaaaaaacaaacaaacatggaagcaacccaagcgtccctctactgagggatgaatagcggggcaaaatctgctccatccacacaatggagtactattcagtctcaaaaaggaaaaagattctggtcaggcacggtggctcatgcctgtaatcccagcacttggggaggctgaggcgggtggatcacctgaagtcaggaattcaaggcccgcctggccaagactggcaccnagctacacanaaagtatanggccccggaaa

SEQ ID NO: 9 - DNA, 72049 bp, Homo sapiens
  unsure (8356),(8385),(38585): Identity of nucleotide sequences at the above locations are unknown.
tataccttgcgcggaccttcggctcctgtggtgaagacaatatgaagaaaatagaaattacccataattttgccacacagacttagttgtgtccatgtatcttgtgcaccttttttctgtttacggatcaaaatcgacttttagggtcaggcgcggtggctcacacctgtaatcccaacactttgggaggctggagttggggttggggggtggatcactgaagatcaggagtttgagaccagcctggccaacatggcgaaactccatctctactaaaaataaaagattagccaggcgtggtggtgggtgcctctaatcccagctactccggaggctgaggcaggagaatcgcttgaacccaggagacagaggttgcagtgagccaggatcacgccactgcactccagcctggcaacagagcgagactctgtctcaaaaaaaaaaataaaaataaaataaataaatacataaattgacttttaggagattggttcaaacaatgtgtgtaatgttgtgtctgagtgtttttcatttatcgttcatgcaaattccgacatcattcactcttctccagagtgtgctgttttcctgcctgtgtcatcacccgtcaccttgaatgccctcgtttaggtaaaataagtacattttattcaaaaatatttgaggacatttgggttgtctccaggttcttggtcttgagttttgctgttcttgtggagccatggtggtgtctggttgcaggaacctccatgcgttccagctgctgcttctgcctgtgttcttagagaggaaatgctggggtccgcggttcccgggctgctgaccaggaagcctgcggtgctttacggcccttccagaagcgggagatgcccccacttaagtgtcagacaggcctttccacctcactggcagctctgagcggctcccttctatttgcagatgactgagaagttaccaatttccacgtttactgactgctgtttctcctgttaatttgtatttatagtcttcgctaatttattgctagggttttggtgttgtccctattgacttgtatgccttttaattttttaaacaacattaatatacttcatttttttagagcagttttaagtttacaggaaaattaagggacaagtacagagagttccttccacctgctgtcctcctctcctcctccccaccttccctccttcccctattgtaactttctttctgatattataaaagtcactcatggctgggcgtggtggctcacgcctgtaatcccagcacgttgggaggcagaggcaggcagatcacctgaggtcaggagttccagaccagcctggccaacatggtgaaaccccgtctctactaaaaacacaaaaagttagccaggcgtggtggcgggcacctgtaatcccagctactcaggaggctgaggcaggagaatggcgtgaacctgggaggcagaggttacagtgagtcgagatcgcgccactgcactccagcctgggcaataagagtgaagcttcgtctcaaaaacaaagtcacacacgcttcttgtacgagggtcatttggccgaggggccagatggctcaccatctagttgggacaggccatgagctcggaatgctttttacatatttacatggttgagaagaaaatcaggagaataatgttttgggacatgggaaaatgacatggaatttgcattttagtgtccataaatgaagttttgtttgctcccagctgtgttgactgaggcaggctggcttcctacagctgcggcagagctgaggaggcgggaaggagaccgtgcaggccgcagcaccgaaaatatttgctctctggcccttcccagagtgcttgccgacctctgtccgacagctagaaggaaggataggacccgtccgacgataaccactgttgacatttgagcgcgtttccttcccggcttttgtgtgagagtggcagtctgtttgcttttgtggtcgggatctgctgcacgcacggcgggctgtttgcatgaggcttcctggaggatagggctgggctcggagctgcacgcagtggggcgtgtcctgcatgcagtggggcctcagaagagagctgtggtgggcggggcagtgccaacgctggtgggtgccaggcctccacgctcagatcagccccggcgacaggtttgggccaccctctctctggcctctgtgcagtggcccaggccgtctgctctgcctggcacacttgcctctgtccttccactgaagcgctcctcttaccctctgctcccggctgggtacgttgaattgtgtccctcaaggagatatgctaaaggtctaaccccaggaacctgtgtatgtgatctaatttggaaacagggtcttggctgatgtaatcaagcgaggatgaggtcaccctagagtagggggcctatatccacggtgctggtgtcctcatgagagcaggtgagcagacactgacactcaggggtgaaggctgcatggagtcagaacagggcttagtgcgatggcggccacaagccaaggaactccaagtatttcctgcaacaccagaagctggaagatgccaggaaggatcctgccctggagccttcggagggagtctgtccctgcagacgtcttgacttttgattgcagggatgcatgtcttagggtgtgtgggggggtgcatttctgatgttagaagccacctggttggtggcgatgtgtcacgggagccctctgcaggttctgcgtgtccatgtggtcggggacagaggtgggcagggacggacggtgtcgagctggacatgtccatgacgtcggccatcccttgggatggcttttttgttttgaggataaggctgcctgccaggaagctgtgccctgcctggcccttgccccaagcccctggcctgtgcttggcctcgcggaagggatgtcgcccttctctcctgcatgcgtgcagggaggaaggggagaggtcagcagcccgcctggaggaggctcgggcgaggggaaggtttcactttcaggcaatgttgtggggctgtttaaacaaccccaaagaaaaccatttggccaaactgttagtttccaaacattttacttccttggtgtttaaataaattcctaccaagactctgtagctggtcccagggaaggagttggcctctcttctttatagcccggcacagtcagtcccctgcacctgcccctcccaaccccaggcctgcttccccgtggccatggctgctgcccggacctctctacacacagaacctcctggaggccagctgtgggcaccagccttggcagggctgtggcggagcccaggctgctggtactctctctgcagctgctccctgctggcctggctggacagcgtccccaccaccactggggtcacctctgtgctggtcacagctcactcagaccttcaggcaaatgggttggatcctgcctctctcccaggtgtctcagtctctgcaaaactcaaaaacctcagaggccttgcagcctgaggggtgtcagagacacctccttcgaatcagtaaacacctacagattcaccccagcagtgaaaggactgcttcgccacagaggtttgatttactcctaagtaattggaagggatgccgagaataggttcctcatggtgggactagaggccctctgctgacctagttaacagagggctagggctgggtgtgctcagcccctgaaggttctaggcccatttgggacaccccgccagaacctgccacaacctgccatgtggtgacagctacctaaatcccagaggctcttgagctggagagcagacctctcaatctcagcaggccccccacacagaccccataaccctagtctgccttcacagtacagttcgtggctatgtgttcacggatggtgttgttcacctaaggtctctgccctgtgaccccaagggcgtcctgagggcagattccaagtctgtttcgtccacccctccttccctagcagcgggtccagggcctggcctgaactagcttcccacagagatactggtgggatgatgaaggcagccaggcggcaagtgaaaaacgcacttcctgcatgtgctggctcctgggattgaagtgtttgaggaagcaaagtgaagtgagctttcctcttgcggctgtgtgtccttgggccgggagcctaccctctctgagcgttggggtccttgtcagtagaatggggcatcctcatagctcaaggggtggtgtgtgaaaattgtgctattgtgttactttaatgattttttttttttcgagacaaagtctcaccccaacgcgcaggctggagtgcagtggcgcgatctcagctcattgcaacctctgcctcctgggttcaagtgattctcctgcctcagcctcccaagtagctggaattacaggagtgcgccaccaggcccggcatatttttctatttttagtagagagggggttttaccatgttggctaggctggtcttgaactcctgacctcaggtgatccacctgcctcggcctcccaaagtgctgggattacaagcatgagccaccgcgcccggcctactttagtgatttcttaggaggacagagggaacgggctggcaagacaggcttggaatgtgttttgggatcaagtgccggtttctgtctggcactggcgttctctgtggggccatgatggacacactgctgaggtcaagcgtgattcgtcttgcgctgtgcctggcagtctcattggaaagttctgtagacatcgtgtggatggggctcttcccggccaagcccttggggaccttccaggactgtgatctccccacagtggctgttaagcagggacctttcgtgaagtggagtctctggtcccctccaagtcatagctagacagggactcgggcatcgccaagcctggctgattattcactggatgaggagacaggcccagagaggggcaggaacctgcccgaggtcacccagcaggccccagaggtttcggtctcggattctccctgctcatccctggatgtagtgctgctgtggatgtggttctgtgctgggggctgtggagagcagggggcttgtgccaggaccccagtgagggtggcgccctcgccatgaggccgactgttggtatggggcggccatccactggggtgtggggaggaacagctttcctgaggaggaggtggcgggaggaacagcttccctgaggaggaggtggcggtgctgtgtgacctgggccttgaaggacaggtccattgtcaacagaacattttgggagtggagcctagagggagaaaatttgttgaaattcagattcccctccccctaccaatacacaccaaatcagatgcccctgaccagatctaaatttggctctcagagatttccattgtagctgggcacttggggaaccttctaagtgctgcctctgcctctccccagcctgcctgcctcagtttccccagccctgggcccgtgtcgctgttgccatcacgtgggcgccctctagtggaggaatcagattatgcactccggggcttggagcaggagtcaggaggggctcctgtctttccttgaaacgttggatgccgggatcctggaacagtctctgcattcctcctggcgagaaccagagcctgggcacaggggaccatctgttgtttgaaggctgcagcctggcagggcactcaggagatctggcagttggctgcagggccaggtctaggggccagggcatcagggaggctctgggctggttcagccccgggcccctttgcagattgtgacctgggcccctgtgcaggggcatggccacaggatgctgggaggggtctctgaccctgaccttcttggctctgtgcatccttgagaccagaaaggtctggaacaaatgagtagacgatgccctaacctggggagggagccacatcctgatcccagcaacctcgggaaggatctgtcaggattatggggcaccctgggggccccaagtctgcatgggtctccacttgcaatttctgtaggaagctctgataaatccaaactgggggtcctaggacacagtcagaaatgctgataccgttgtgtgtggagcctcgggccctgggggtcaggagcatgtggagggtgggccacgggggttcagaagagaatcctgtaaccccccaccccccaaactgaagcccacttgagggccatggctgaaaggttggggggtctccgtgcgtcctgtggagtgggtggtgaggagtccttgggtttgcacgcctctgggcctgagcggcgggaccccgtccacagcggatccctgggccctgttgctcagatgctctcagagtgttgctgtggccacggagggagcctgagttaagcttctcttgtgccggttgtacgctgtcaggtcacactggtgagttaggcagggcacagatgcccagagcagagggaactttccttggggattcaacacgtgcaagtcttaggggctggcaaatcctgccctcagctagagagggggcttttatttgagaccagaatcacctgagcatcctcctgtccccagctgtgtccagcctgtctgcagggacatcctgagaggaccaggctctcccctcatccacctgcctaagtgccactctgaaccctgtccacctgtgccgtggaggggcgtgacctcaagctgctcagccagcagcaggcttggccctggggggcagcagagacccaggtggctgtggggtgggtgcttcgtggcgtggttctgaaacttcgttggaagtgtgtggacagtgccttgcctgttctctgtgggaccctatttagaaacgaggtctgagttactgggggtcatcactgtgttctgatggcccagctgtgtggaggccgcggtgcagccccatccaaggagccagggccctgggtctagccgtgaccagaatgcatgccccggaggtgtttctcatctcgcacctgtgttgcctggtgtgtcaagtggtcgtgaaactctgtgttagctcttggtgttcctgaaagtgcccccgggtctcaggcctcagaaccagggtttcccttcatctcggtggcctgggagcatctgggcagttgagcaaagagggcgattcacttgaaggatgtgtctggccctgcctaggagccccccggcacggtgctggggcctgaagctgccctcgggtggtggagaggagggagcgatgaagtggcgtcgagctgggcaggaagggtgagcccctgcaaggtgggcatgctggggacgctgagcagcatggccagcagctgggtctgcagcctggtacccggcgggacttgtggttggggctggtttgtggccaggagaggggctggcaggagacaagggggactgtgaggcagctcccacccagcagctgaagcccaatggcctggctgtgtggctctcagctgcgtgcataacctctcagtgcttcagttctctcatttgtaaaatgaggaaacaaacagtgccagcctcccagaggtgtcatgaggatgaacgagtgaccatgtagcatgggctgggtgcgtgtcacctaacatcaccagcctttgcaaggagagccctgggggcctggctgagtatttcccttgcccggcccaccccaggcctagacttgtgcctgctgcaggcccttgacccctgaccccattgcacctgtctccacaggagccgaggaggtgctgctgctggcccggcggacggacctacggaggatctcgctggacacgccggacttcaccgacatcgtgctgcaggtggacgacatccggcacgccattgccatcgactacgacccgctagagggctatgtctactggacagatgacgaggtgcgggccatccgcagggcgtacctggacgggtctggggcgcagacgctggtcaacaccgagatcaacgaccccgatggcatcgcggtcgactgggtggcccgaaacctctactggaccgacacgggcacggaccgcatcgaggtgacgcgcctcaacggcacctcccgcaagatcctggtgtcggaggacctggacgagccccgagccatcgcactgcaccccgtgatggggtaagacgggcgggggctggggcctggagccagggccaggccaagcacaggcgagagggagattgacctggacctgtcattctgggacactgtcttgcatcagaacccggaggagggcttgttaaaacaccggcagctgggccccacccccagagcggtgattcaggagctccagggcggggctgaagacttgggtttctaacaagcaccccagtggtccggtgctgctgctgggtccatgcgtagaaagccctgnaaactggagggagccctttgtccccctgncttcagtttcctcatctgtagaatggaacggtccatctgggtgatttccaggatgacagtagtgacagtaagggcagcctctgtgacactgaccacagtacaggccaggcctctttttttctttttttttttgagatggagtctcactctgtcgcccaggctggagtgcagtggtgtgatctcagctcactacaacctctgcctcctgggctcaagtgattctcctgcctcagcctcctgagtagctgggattacaggtgcctgccactgtgcttggctaatgtttgtatttttggtagagatggggtttcaccgtcttggccaggctggtcgcaaactcctgacctcaggtgatccacctgcctcagcctcccaaagtgctgggattacaggcatgagccaccacgcccggtcaggccaggcctcttttgaacactttgcacaccatgggtcttttcatccaggggggtaggtacagttgtacagttgaggacactgaagcccagagaggctcagggacttgcccagggtcacacagcaggatgtggcaggtgtggggctgggcctggcagcgtggctccagctttccagcatagaaatctgtgaaagcagatagtttgtcggtcggtaggggagactttctgagacccgccccagcggctcagagggtagtagccaggggccttcctgggggctcataacccagaacactgaatgggaaaaccctgatggaggaggcgcagtggagctgtgggtgccgatgggaagtcccagaggagctgggaggtcagtagcggtgctgccctctgtggagcacttagtgggcaccaggtgtgtttccaggttcatggccctgggacctgaagctcagaaggtgaagtaacttgcccagggcacccgtcgggcagcggcgggcagaggatttgtgggctgtggagcctgtgctcgtggcccagccctgggggttgtgagtgtgctggccggggagcttttcctgcaagtggactggtgtctaggagccagcatgtcaggcagcaggcagcgggagtgcagcaggcagcgggagcacagcaggcagagggcggggctcgagcagccatccgtggaccctggggcacggaggcatgtgggagagggctgctccatggcagtggctgaagggctgggttgtgccccgaggagggtggatgagggtaagaagtggggtccccaggggctttagcaagaggaggcccaggaactggttgccagctacagtgaagggaacacggccctgaggtcaggagcttggtcaagtcactgtctacatgggcctcggtgtcctcatctgtgaaaaaggaagggatggggaagctgactccaaggcccctcctagccctggtttcatgagtctgaggatcccagggacatgggcttggcagtctgacctgtgaggtcgtggggtccagggaggggcaccgagctggaagcgggaggcagaggggctggccggctgggtcagacacagctgaagcagaggctgtgacttggggcctcagaaccttcacccctgagctgccaccccaggatctgggttccctccttggggggccccagggaacaagtcacctgtcctttgcataggggagcccttcagctatgtgcagaaggttctgctctgccccttcctccctctaggtgctcagctcctccagcccactagtcagatgtgaggctgccccagaccctgggcagggtcatttctgtccactgacctttgggatgggagatgagctcttggcccctgagagtccaagggctggtgtggtgaaacccgcacagggtggaagtgggcatccctgtcccaggggagcccccagggactctggtcactgggcttgccgctggcatgctcagtcctccagcacttactgacaccagcatctactgacaccaacatttacaaacaccgacattgaccgacaccgacatttaccgacactgacatttaccaacactgtttaccaacactgacatctactgacactggcatctaccaacactgacatttaccgacactgacatttaccaacactatttaccaacactgacatctactgacattggcatctaccaacaccaacatttaccgacaccaacatttaccaacactgaaatttaccgacaccgacatttaccgacaccgtttaccaacaccgacgtttaccgacaccgacatttaccgacactgatatttaccaacactgacatctactgacgctggcatctactgacaccgatgccagcatctaccaacaccgacatttaccaacactgacatttaccaacactgacatttaccgacattgacatttactgacactgacatctactgacactggcatctactgacactgacgtttaccgacactagcatctactgacactgacatttaccaacaccagcatctaccaacaccgacatttaccaacactgacatttactgacactgatatctactgacactggcatctactgacaccaacatttaccaacaccagcatctaccaacaccgacatttaccaacaccagcatttaccaacaccgatgtttaccaacgccgacgtttaccgacgccagcatctaccaacactgacatttaccgacaccgacatttaccgacactgacatttactgacactgacatctactgatactggcatctaccgacactgatatttaccaacgccagcatctactgacactgatgtttaccaacaccgacatttacgagcaccgacatttactgacaccaatatttactgacatcaacatttagccatgtgatgggggccggcttgggggcaggccttgctcttggcactggggatgctgcagagaccagacagactcatggggtcatggacttctgcttcttctccagcctcatgtactggacagactggggagagaaccctaaaatcgagtgtgccaacttggatgggcaggagcggcgtgtgctggtcaatgcctccctcgggtggcccaacggcctggccctggacctgcaggaggggaagctctactggggagacgccaagacagacaagatcgaggtgaggctcctgtggacatgtttgatccaggaggccaggcccagccaccccctgcagccagatgtacgtattggcgaggcaccgatgggtgcctgtgctctgctatttggccacatggaatgcttgagaaaatagttacaatactttctgacaaaaacgccttgagagggtagcgctatacaacgtcctgtggttacgtaagatgttatcattcggccaggtgcctgtagacacagctacttggagactgaggtgggaggatcgctggagtccaagagtttgaggccagcccgggcaaaggggacacaggaatcctctgcactgcttttgccacttactgtgagatttaaattatttcacaatacaaaattaagacaaaaagttaatcacatatccactgccctgcttaagacagaaaacatgggtgttgttgaagccagaggcagctgctggcctgagtttggtgattggttcctaagcagttgaaggcagttttgtttttccatagatgtctgttctccctttgctgggtgcagcctcgccctgctgctgtggtcgggtttcagtggcctcgtcccgtggacgcagcctcgccctgccgctgtggtcgggtttcagtggcctcgtcccgtggacgcagcctcgccctgccgctgtggtcgggtttcagtggcctcgtcccgtggacgcagcctcgccctgccgctgtggtcgggtttcagtggcctcgtcccgtggacgcagcctcgccctgccgctgtggtcgggtttcagtggcctcgtcctgtggacgcagcctcgccctgccgctgtggtcgggtttcagtggcctcgtcccatgggcgtgctttggcagctttttgctcacctgtggagcctctcttgagcttttttgtttgttgtttgtttttgtttgattttgtttgattgtttgtttttgttgtcgttgttgttgcccaggctggagtgcagtggcgcgatctcagctcactgaaacctctgcctccttgggttcatgccattctcctgcctcagcctcccacatagctgggattacaagtgcccgccaccacgcctggctaaattttgtatttttagtagacagggggtttcaccatgttggtcaggctggtctggaactcctggtctcacatgatccacctgcctcggcctcccaaagtgttgggattacaggcgtgagccaccgcgcccagccctctgttgagcatattttgaggttctcttggtgccagtgatatgtacatgtgtccccatcgcaccatcgtcacccattgaggtgacattggtgcctctcctcggggtggatgcctccctctgtttccagcaacttctgaaggattttcctgagctgcatcagtccttgttgacgtcaccatcggggtcacctttgctctcctcagggctcccaggggaggcccgaatcaggcagcttgcagggcagggcaggatggagaacacgagtgtgtgtctgtgttgcaggatttcagaccctgcttctgagcgggaggagtttcagcaccttcagggtggggaacccagggatgggggaggctgagtggacgcccttcccacgaaaaccctaggagctgcaggtgtggccatttcctgctggagctccttgtaaatgttttgtttttggcaaggcccatgtttgcgggccgctgaggatgatttgccttcacgcatccccgctacccgtgggagcaggtcagggactcgcgtgtctgtggcacaccaggcctgtgacaggcgttgttccatgtactgtctcagcagtggttttcttgagacagggtctcgctcgctcacccaggcgagagtgcagtggcgcaatcacggctcgctgtagcctcaatctccctgggctcaggtgatcctcctgcctcaccctctgagtagctgggactacagacacataccaccacacccagctagtttttgtgtattttttgtggggggagatggggtttcgctgtggtgcccaagctgatctcaaactcctgaggcacaagcgatccacctgcctcggcctcccaaagtgctgggatgacaggcatcagccgtcacacgcagctcaatgattttattgtggtaaaataaacatagcacaaaattgatgattttaaccattttaaagtgaacagttcaggctgggcgtggtggcttatgcttgtaatcccagtactttgagaggctgaggtgggcagatcacctgaggtcaggagtttgagaccagcctggccaacatgatgaaatccagtctctactaaaaatacaaaaattagccgggcatggtggcaggtgcctgtaatcccagctactcgggaggctgaggcaggagaatcgcttgagcccgggaggtggaggttgcagtgatctgagatcatgccactgcactccaatctgtgtgacagagcaagactctgtcttgaaaaataaataaataaaaaaaattttaaaaagtgaacaattcagggcatttagtatgaggacaatgtggtgcaggtatctctgctactatctacttctagaacactttcttctgccctgaaggaaaccccatgcccaccggcactcacgcccattctcccctctctcccagcctctgtcaaccactaatctactttctgtctctgggggttcacttcttctggacgttttgtgtgactggaatcctgcaatatgtggtccctgcgtgtggcttctttccatagcattgtgttttccagattcacccacacattgtcgcacgttatcagaatctcattcctgactgggtgcagtgggttaggcctgtaatcctaacattctgggaggccaaggcgggacgatcacttgaggcaggagtttgagaccagcctggccagcctagcaagaccccagctaccaaaaaattttaaaagttaactgaacgtggtggtggtgggcacttgtggttcccagctacctgggaggctgaggttggaggatcgcttaagcccaggaggtcaaggctgcagtgagctatgatcgcaccactgcactccagcctggacaacagagcaagaccctgtctgaaaaaaaaaacaaaaaaaaaagttcctttctttttgtggctggatgacatcccattgtatggccacagcacattttgtttgtctgtttatcgggtggtgggcagtggtttccaccttttgtctcctgtgaataatgctgctgtgaacatttgaattcaagtttttgtttgaacacctgttgtgaattatttggatatatgtgtaggggtaggattgctgagtcctatggtaatgttaggtttgacttactgaggaaccattaaactgttttcaacagtggctgcgccgttctgcatccccaccggcagtgtgtgagggttctgactttacctcctcacaaacgcttcttttccatttaaaaaaatattcagccaggtgctctggctcacgcctgtaatcccagcactttgggaggccgtggcgggcggatcacctgaggtcaggagttcgagacgagcctggccaacatggtgtaaccccatctctaccaaaaatataaaaattagccgggtgtggcagcgggcgcctgtaatcccagctacttgggaggctgaggcaggagaatcacttgaacccgggaggcagaggttgcagtgagccaagatcgcgccactacactccagcctgggtgacaagagtgaaactccatctaaaataaaacaaaaataaaaataaataaaaatttattaaaacattcatcacagccagcctagtgggtgtcccatgtggctttgcctcgcatttccctgataactaggatgctgagcgtcttgtcccaggcttgccacacctcagcactttgagatacgtcgcacagtccccatttgcgaacgagaaatgaggtttagggaacagcagctgtgtcatgtcacacagcgagcagggggtctctgagccgtctgaccccacagccgaccaagctccaatccttaccgcctcctagtgttgtggatgtagcccagggtgctcccacatttttcagatgagaacaccgaagctcaaaacaggagcgttttgtccacattggatacacgatgtctgtggtttggtcctgaagtcactttatatctcagtggtccagactggagtaggacagggggttctggggaatggggaaggtgtctcaggtgaaaggaaggaattccagattctccatactgtccttgggaagttagaagactcagagggtctggcaaagtcagacaaagcaagagaaatgcagtcaggaggaagcggagctgtccaggaacaggggggtcgcaggagctcacccccaggaactacacttgctggggccttcgtgtcacaatgacgtgagcactgcgtgttgattacccactttttttttttttttgaggtggagtctcgctctcttgcccagtctggagtgcagtggcacgatctcggctcactgcaagctctgcctcccgggttcatgccattctcctgcctcagcctcccgcgtagctgggactacaggcgcctgccaccgcgcccggctaatttttgtatttttagtagagatgggatttcactacattagccaggatggtctcgatctcctgacctcatgatccgcccgtctcggcctcccaaagtgctgggattacaggcgtgagccaccgcgcccggcccgatttcccactttaagaatctgtctgtacatcctcaaagccctatacacagtgctgggttgctatagggaatatgaggcttacaggccatggtgctggacacacagaagggacggaggtcaggaggtagaagggcggagagagggaacaggcggaggtcacatccttggctttcaaaatgggccagggagagacaccctctgagcatggtaggacaggaaagcaagattggaacacattgagagcaaccgaggtggctgggcgtggtggcttacgcctgtaatcccaacactttggaaagctgaggtgggtggattgcttgaggccaggagttcaagaccagcctggccaacatggtgagaccccgtctctactaaatatacaaaaattagccaggcgtgatggtgcatacctgtaatcccagctgcttgggaggctgaggcaggagaattgcttaaacctgggaggcggaggttgcagtgagccgagatcccgccactgcactccagcctgggccacagagtgagactccatctcaaaaaaaaaaaaaaaaaagataaaaagaccaaccgaggaattgaagtgggggggcgtcacagtagcagaagggggatcgtggagcaggccaccctgtggtcatgcactggaagctcattacctgacgatttggagctcatcactgggggcctaaggagaatagatactgaaggatgaggagtgatggcgcggggcacgggtgtctttggtggccagaacttggggactgctggggtgcctcactgcaggccttctcagcgccctttatatgcttacacaggctgtttctaagagggggatacattgcataagcgttttcagactacctcatcatgggtccctttctttaccctctgtggccctggtggcgcactctctgggaaggtgcaggtggatgcccagacccgccctgccatccacctgcacgtccagagctgacttagcctcgagattgctgctggcacctcctgccccgggacacctcggatgtgcccgtggagatgctggctctgtgttttctgctggagtttggtgcgtcttttcctcctgcaagtggccaccgctcttgggtatgtcctcaggcttctgcgagtcatggctgcttctcaggtccttgcccagcgccaggagcaaaccctcctggcactttgttcaggggtggatgcgccagtgttcctgctgtggaccgccatctcacatgagggtcttgggcctgcaggctcgttcaggaaacacccgctgagtatgcagtgtgtgccagctgtgtcccaggcaatggcggggacagtggctgctgctggggttgtggtggcttctggggactctggggacagctgaggtgcaaggagccacggctccttgaggatgcagttggactccaggtggaagggatggttgggggaggtataaatggggtcagggaggagacacatttggaacaatgggaacatttttaagatgctatgtcgggaggcaacaaggtggccaacccaggtgctgaggagcccacaccagccctggacgtgttttgccgctcacctttgctggggagtggtgggagagaggattccgttccacgtggtggtgtgcgcagctgggctgtgtggagctgggcgctaggaggaaggtgctttctgcggggctagccgggctctgcctttgaacacaatcaggctccaggttttcagcatccagtgcatgagaggacttcacgggcagctgtggctgatcccttgatgaattgggagaagaacaaaggtctatgaaatgaggtttcatgtagatggcattagagacgcccacaacagatttacagagtggagcggagacggcggatgggtctgggaggcccctcctgctggccttgactgtgacagctgtcctgggaatcagcttccaggccgccccagcagcctgactgacacacacaggggttttagccccatcctgcgaccagctgttgccatcatcagtgacagctgggagtggcggtggttccagccctgggcaccctccccacctgctggggcccacccagggcagtcctgacacctacaggttgcttggagccgcatccgagtcctgccccaccacgtgtgaagcccgagtggtcgtgggctgaggtcccctgattgcatccccacttcccttctgcttcacatagctgcctcttctcaccgtttttccagcctcctgggctaggaattccagtgttgtgctggctttgccccaggacacctccttagccctcttcctgagtctagagccccgggggttggaagtcctggcccctgggacacctgcagccacactcagcttctcctgtgagcctccagcatgtcccctcaggaccaagccctcacgttcttgcctccccgcccacctgggctcagccaggggaaggcctggctgggagcgtctcccctctgccctgcccttctcccctcctaccctgcccttctctcctctgccccgccatggcttttatatcctgtgccacaagacatggctgtgtgtgaaagtggcagggtctggcatctctgtgggtctctgaggcccacgctccagtgccactcttcccacccgctggccgtgccctcatgctggagggacagcccagccctctcccgaaccccagccccatgtgcccagctgcccccggccctctcccctggaagccggggtcactccagccgtatgccatggtggggacatcctgcttccttggccttccagggaaggtcctctttccaaatggcgacacctggtccctgcctggaggctggaagctgtggcccttgtatgcccctccagggtctgtgcgctcggttggcccgagttcccatcaccgtcatcatcaccatcatcattgtcatttcgcttgtctgtgagccggcctggtctcccagagcagagaccctctgaggtccagcctgagttggggtctccgtgctgacccctgacggggactcaggacgtaccaggtctgggtcaggagtgacccccaaacctcgtgccctttgacaggcacccctgacttttgctaagtgggtggaggtgacatcacttacagcgggagtgatgggacagggtctgttggctgcactgtgctcccagggatctggggagaggctatatccctgggctttggcactgcagagctgtgtgtgtttgtgtgtgtgtgtgtgtgtgtgtgtgtgtgtgtgtgtgtgtgtgtgtttgcgtgcgcgcacatgtgtataagatctttttttattacatgaagcaagataactgttgctgtttccttttgggttttgtgttcaacagagtggggtacttcttccctcagacaacagaactctcccctttaaacacgtgctgtcagagggtgggtcttgggctcatgtctgtttgcacagccgagtcagaggaaacacagggttcttcataaaaacactgcacagcaggcgactgtccagagtcagcctgcaggacggcagcagccctgcccctcagagcacagctagggtgggctgctttgggatctcccgtcattccctcccagctggcagccggcggccggcccattccttggtgtgctggtcaggggggcgtgcgcctgctctgctcaccctgggaatgggacagaagctggcagctcggagaggacagggctggacccttgggtggcctctggctggaccatctcattgtcctcagacacagcctctcgggtctagtttcatttcctgaaaaacaagtgcacagaactagagcaggagtcgagagctacggcccccgggccagatccagccctgccacctgttttcacaccatgctcaagctgagtgggttttacattttttaattacttgaaaaaaaaaaagccaaaggaggtttcatgacccatgaaaattatatggaattcaaaaaaaaaaaattatatggaattcaaatttcagtgtccataaataatttcttgagacagggtctcgctctgtcacccaggctggagtgcagtgctatggcatggctcgctgtacccttgacctcccaggctcaagcgatcctcctgtctcagcctcctgagtagctgggactacgggtgtgtgccaccaagcccggctaatttttttttaattttagtaaagacagggtctttctatgttgcccaggcttttctggaactccatcttggcctcccaaagtgctgggattacaggctcgagccacggagcccagcctgtttttgttttttcactgataaagttttgccgggtgtggtagtgtgtgcctctagcgatttgggaggctgaggtgggaggatcgcttaagcccaggagtttgaggctgggctcaagtgatcaggaggtgaactatgatcatgtcattgcattccagcctgggtgacagagcaagaacctatctcttaaaaatatatatttaaaaagtattgggtgtggtggctcacgcctgtggtcccagctacttaggcatctgaggtgggaggatggcttgagcccaggagtttgaggttgcagcgagccaagatcgtgtcactacactctagcctgggtgacagagcccagaccctgcctctttaaaaaaaaaaaccaaaaaacatgtattggaacacagccatgcctgttcagtcacgtgctctccatgctgctttctgctccagagacccttatggcctgaaagctgaaaatattttctatcctttacaaaaaagtttgctgacctctgtcctggaaaattcatctcccaagttctcttccggcactggcgttcctgggtgtcctaaatttggcccctgttatttctgaactctgttttggctctgttccctcccaggagccaggacaggcacgttctctgcatcttgtcccctgacgcccagaggcttggctcggctcaggcattcttggaaatatctggctccaggaaaggcagaggcctcctgagtcggcccagagggaacctgccccaggtctgggggaggcctgacccagcagagtggcttttgccgatgggttgggccggtcaagatgtgctgaaagttgtcctcagaaggccactttgggattccttcctccagtattagagcaactgagagctgctcattgcaagcctgatgttttcccagttggccgggtccaccgggtgccctgggattctgggatctgggtggaaagtagggggcttgggggagtgtcctgggttctggaatccaggtggcaagtggtgaggttcagggagtggcttctgagccaccataggggtctctgtgggaggctctgcccatccaggagattccgcaggccctgccggcccagagccagcgtcttgcgcttgccgaggctacagccagccccagccgggtggaacagcccgtcgcctcctctcactttgttttggggccacctgggagtgtggagcaagggtagagagggaggaagtggctgccggccgctgcccagcacccttgtttgccttgggccctctgtgggctcctttttattgctcttcaatgaagccagggaaatggacttccttgcctcacttcagttcaacatgtctggaagtttggtattaaaattaagaaagtgtggaaatagagcaagaagagaaaaatctctccaagagataatagtgacctctgagctgggcgcggtggctcacgcctgtaaatcccagtactttgggaggctgaggcgggcagatcacctgaggtcgggagtttgtgaccggcctgaccaagatggagaaaccccgtctctactaaaaataaataaataaataaataaataaatacaaaattagccaggcatggtggcgcctgcctataatcccagctaaggcaggagaatcgcttgaacctgggaggcaaaggttgcagtgagccaagatcacgccattgcactctagtctgggcaacaagagtgaaactccgtctcaaaaaaaataaataaataaaaaataaaaatagtgacctctggccaggtgtggcagctcatacccgtaatcccagcactttggaaggaaggccgagatgggcagattgctttagcacaggagtttgagaccagcctggccaacatggtggaaccccatctctacaaaaatagaataaaatttaagaggtaatagtgaccttttggtagatcgaaacctggattgctttctttttctaaatgctgattcttttctttgtggtgtttgtgttctgtgccgatgtccctcccccagccctgttattgtgagtggaagaaggggaaagggttcgcccgctactgtgagcccctcctctcacgctgggtgtccttggagaagcctgcacttcttcattgtacgccagggctgggtccctccctggagtggttctgtgctgctgggatggggccaacccctcagatgttttctgagtgtcacacacaggtgtgtgcattcatggcctttgcgtgtcttcctgttgtggaggcaaaaatgtgaagaaccctagatgattttgggaccagggctccatcacctgctgttcattgcacaccggagcatccaggcatgggtggagagctcagacttccaggcacggtcgcaggggctggtctaaccatgttcccgcccgcctgctcgtcagaaccgcctgttgggagctgttatcatgataccatacctgggccctgggctatccgattctgacttaattgctccaggttggggccaggccgttgtttgctgttttgttgtttcttctgtgacgttagccactgggctaatctgagcccctcagttacaggtggagaaactgagacccatgggggtgcaaggacttgccgaggacccagagccccttgggggcagagctgaggcggggcctggctttgggtcccagagcttccagtccccttcccgctctcctaacagcttttttttttgagacaagatctcaccctgtcacccaggctggagtgcaatggcatgatctcggctcactgcaatcttcgctagctgcgttccagcgattctcctgcctcagcctcccgagcagctgggattacaggtgtgtgccgccatgcccagctcgtttttttttgtacttttagtagagatagggtttcaccatgttggccaggctgatctcgaactcctgacctcaaatgatccgcctgcctcggcctcccaaagtgctaggattacaggctgggatcacactgtgcctggccctagcagctttgtcctgtgccatccaacaacagatgaccgaagtctttgtttcttaacatgcattccatctgccttacagttttgccacctgcaaaacagaggacttgtcgcttttctggtaagctggaaatgtaatctggtagcaggaggcctgtggaagcttgcctttaatggccttgtgtctctttcatcctgtcctgagagccggagaacttggatgttgcacctaactcaaccttcctgttaacatacagttctgcaggctcatggatcatcagaaccacgtcctatctcacgcggctgtatgcttccgttggttcaggtgtttttaccttgacagtattttctcctcggtggcttttgcggtggttgcttttaatcagcattgactcttcaagaaaaatatttagctgctacatctcagaggagacagggtggaaagcatctgagacctgcaggctcagacttagaaccagaagtgccctcagagttcatccggccctgacccagcgggaaatgagttcacagagaagcgggagaactttgccccaggccctgccgttgctcataactgccccaggtccttacatttgctccaggtcctgccccaggccctgcagttgctcataactgccccaggtccttatatttgctccaggtcctgccccaggtcctgcagttgctctgtgtggtgggtgtgatctggagccctccgcccattgctgcacctggggcaggcattgctaattgatcccaggactccttcctgcggagcacgccctggttctccaggcagccgctgcctgtcagcctgcagtggttcgggagaggacacctgcttgcctggtctgttccaaatcttgcttctcatcccagcacaggtagggggtgctatgggaaagggatcctcagttggccctgtcactgctctatcagctggggacgtggcatcctagtgaaaacatcatggccgggcgcggtggctcacgcctggaatcccagcactttgggaggctgaggagggtggatcacttgaggtcagaagttcgagaccagcctggtcaacatggtgaaacccatctctactaaaaatacaaaaattcgccaggtgtggtggcgggtacctgtaatccgagctactcgggaggctgaggcaggagaatcgcttgaacctgggaggtggagcttgcagtgagccgagatcttgccactgcactccagcctgggcaacagagtgagacgctgtctcaaaatctcaaacaaacaaacaaacaaaaaacaaacaaacaaagcgtcatttatccagcacccctggggaaccatgctacctggtgttttatggtacctggcaaggtgcaggtgaagttgctgctcttgggcattgaacccgtcttgtttggggcagctcaggccccaggcagggtccgggttggctctcgttggtgtggccctggcccatccagacctatatttctgccgtcctgcaggtgatcaatgttgatgggacgaagaggcggaccctcctggaggacaagctcccgcacattttcgggttcacgctgctgggggacttcatctactggactgactggcagcgccgcagcatcgagcgggtgcacaaggtcaaggccagccgggacgtcatcattgaccagctgcccgacctgatggggctcaaagctgtgaatgtggccaaggtcgtcggtgagtccggggggtcccaagccatggctcagccatgcagacttgcatgaggaggaagtgacgggtccatgcctgggcataagtgttgagctcaggtgccccgacctggggaagggcaggacaggaaaggtgacagtatctggccaaggacagatgggaagggaccaagggagctgattagggagtggttatggactaggaatgtcggtaacaatggttagaaagtgactaacatttgttgagcacctgctgtgtgcccggccctggccgggagccttcgtgcccacagtgaccccgtctgcaaatgtagttccttgccctactcgcactggggagcaggacgcagagccgtgcaactcacaggtgccaagctcaggactccctcctgggtctgcctgggctgggctgtgcttgttgcccctgtggcccacgcatgtgcaccttccacctgaaagccaggatcttcaggacgctccccgaggaggtcgttgtctggcacaatgatttgtctcttcctgaaaaggtgacagagttacactggagagagcagcatccaggtgcggcagggacaggcctggggctcgcgggcagggactctgtgtcctgccggggtcccacactgcacctgcttgtcagaggcactcagtcaatctttgctgatgaaggatgagaggacagaggacgtgatgcttgctgctgcattgcctgcagtcctgggtgagatgcccgggttgactctgctgcccgtcgggtggatgtgatgtcagatccccggctttaaaatacgagggagctgggaattgagggagcaggttggggcagaaagcacagccccgtggaagcctggagctgaggcagtgtgggcgacccctggagcagtgagtgcttccttcatggccttcatcgcaccctgcagtcctcatgtaggggatgccatccatgaatttagttttcccagcctcctttaaaaacgcgttcatgctggggccggggcagtgcagtggctcacatctgaaatcccaccactttgggaggccgaggcgggtggatcatgaggtcaggagatcgagaccatcctggctaacaaggtgaaaccccgtctctactaaaaatacaaaaaattagccgggtgcggtggcgggcgcctgtagtcccagctactcgggaggctgaggcaggagaatggcgtgaacccgggaagcggagcttgcagtgagccgagattgcgccactgcagtccgcagtccggcctgggcgacagagcgagactccgtctcaaaaaaaaaaaaaaaagtacaaaaaaaaaaaaattagtctgggtgtggtatcacgcgcctataatctcactactcgagaggctgaggcggagaattgcttgaacccaggaggtagaggttgtagtgagcccgtatcgtaccactgccctccacctgggcaatagagcgagactctgtctcaaaaagaaaaaaaaaaaaagaacatttatgccaggtgtggtggctcatgcctgaaatcccagaactttggaagactgaggcaggaggatcacttgagcccagaaatttgagagtgtcttccctgggcaacatagagagacctcatctctaccagaaaaaaaaaaattagcccggcatggtggcatatccctgtggtcccagctacttagggggctgacgtggcaggatcacctgagtctggaggcagaggttgaagtgagctgagatcatgccactgcactccagcctgggtgacagacagagaccctgtctcaaaaaaaaaaaaaaaaaaaagcatttactatccaccatggaaggtgagactgacctgtgagtgattgttcaaagaacaaaaaataaaccccagagataagacaaaagggtgcctccatgggggtgtgatttaaagctgagaaattgggcttcttccccctcccctctcaccccgtggtttgctaaaggagatgggaaaaaggattctttttttggctgaaatatttaacactaaattaaagccaattttaacagcactttggttgatgagtgaaattaacagactggccaaaaataaacgaacggtctgtactatgtgaaaaagaggcagctttggccatgctgggccaatgtgagttttcagggttgctgggaatgtctgtgaatcggaggaagggcctagctgggactctcaggagccaaggccctgaggggcaacttgcctggtccctgccctgaggcgttcactgctttcttcctgggccagatcacaggcccggaggctggaccactgggctggcactcttgccgagctgctccctgacttcctgaccatgctcctttcagcagccttgctgcactttagtttccttgaatgaaaaatggggatgagaatagctcctacctccaaggtgaatggagtgagttcggacaggtgactccctgggaccagtgcctggcgcctgacaaggtccagtcagagcccgcactgctgttactgatacccttggctgtaccaggggagaacttggttgccattgccaggtgttctcccaccacccccactactgtccctgtttgatgtgtggcgggaataaagctgtgcacattggagcttttggcacatcctggctttcaggtgaaaggtgcgtgtgtgtttgagggtttagcctggccaacccagccatgaggtcggacctgacctgggggtgagtcctgagctcggcacccctgagctgtgtggctcacggcagcattcattgtgtggcttgggccgcacccctttccctgctgggctgttgatgtttagactggagcctctgtgttcgcttccaggaaccaacccgtgtgcggacaggaacggggggtgcagccacctgtgcttctgcacaccccacgcaacccggtgtggctgccccatcggcctggagctgctgagtgacatgaagacctgcatcgtgcctgaggccttcttggtcttcaccagcagagccgccatccacaggatctccctcgagaccaataacaacgacgtggccatcccgctcacgggcgtcaaggaggcctcagccctggactttgatgtgtccaacaaccacatctactggacagacgtcagcctgaaggtagcgtgggccagaacgtgcacacaggcagcctttatgggaaaaccttgcctctgttcctgcctcaaaggcttcagacacttttcttaaagcactatcgtatttattgtaacgcagttcaagctaatcaaatatgagcaagcctatttaaaaaaaaaaaagatgattataatgagcaagtccggtagacacacataagggcttttgtgaaatgcttgtgtgaatgtgaaatatttgttgtccgttgagcttgacttcagacaccccacccactcccttgtcggtgcccgtttgctcagcagactctttcttcatttatagtgcaaatgtaaacatccaggacaaatacaggaagactttttttttttttttttgagacagagtcttactctgttgcccaggctggagtaccgtagcgtgagctcagctcactgcaacctccgcctcccaggttcaagcgattcttctgcctcagcctcctgagtagctgggactacagacatgcaccaccacacccagctaattttttttatatttttagtagagacagggtttcatcatgttggccaggctggtcttgaactcctgacctcaggggaacagacggggttggcctcccaaagggcggaaataacaggggtgagccaccgttcccggcctaggaaaactttttgccttctaaagaagagtttagcaaactagtctgtgggctggccttctgattctgtaaagaaagtttgattggtggctgggtgcggtggctcacacctgtaatcccagcactttgggaggccgaggtgggcagatcacctgaggtcgggagttcgagaccagcctcaccaacgtggagaaaccccgtctctactaaaaatacaaaaaaaaaattaaccgggcatggcggcgcctgcctgtaatcgcagctactcaggaggctgaagcaggagaattgcttgaacctgggaggcggaggttgtggtgagctgagatggcaccattgcactccagcctgggcaacaaaagtgaaactccgtctcagaaaaaaaaaagtttgattggtgtaaccaaagcgcatttgtttatggattgtctgtggcagcttttgttctgccgagatgagttgtgacagatctgtatgggctctaaagcctaaaacatgtgccatccgcccctttacagaaaaagtgtgctgacctctgttctaaagtattggacaactacaatgtttgctcatttattattctatgatttgttttctgctttttgttgttgttgttgttgttgagatagggtttccctctgtcactcaggctggagtgcagtggtgtaatttcagctcactgcagcctcgacctcctgggctctagtgatcctctcatctcagcctccctagtagctgggactacaggcacacaccaccactcctggctgattttttttttttttttttttttttgtggagacagggtttccgcatgttgcccaggctggtttcaaactcctaggctcaaacacccacctcagcctcccaaagtgctgggattacaggcgtgagccaccatgcccagcctattctactgtttgtattacatagctttaaaagattttttatgactttaagtcacaagggttctttgtagaaaaaaatatatatataggaaagtataaaaagaaagtaaaaattgtccataacctctccagccagagacgaccgttgctgacacctcagcatattgcctttaagtcttttttctctaagatagcatttctcttcatcacagtcatatgctacgcagaattctgtatcctgattttttcacttgacattacaacaggtatttgatggcgctgtgacaaactctttggcacaatcttttaaatgtatgaaatactccactgcacagatgtttgcttttaggcttaactgttcttttattttgcgtgtgctggttacagccgggcacagtggctcatgcctgtaatcacaacactttgagagggtgaggcaggaggatcacttgagcccagaagtttgagaccggcctgggcaacatagtgagaccccatctctacaaaaaacttttttaataagtcgggcgtagtggtgcatagctgtagtcccagccaccaaggaggctgagttgggaggattgcttgagccccaggaggttgatgctgcagtgacctgagattactccactgtactccaacctgagcgacagagcaagacttgtctggggaaaaaaaaaaaaaaaatatatatatatatatatatatatatacatatatacatacacgcacacacacataatataaaaatatatatttataaatatataatatataatataaaaatatatatttataaataaaatttataaattatatttataagtaaatatataatatataatataaaaatatatattatataatatataataaaatatataatataaaaatatatatttataaataatatataatacatacttataagtatatatttaaaatatatgtaatgtatattttttaatgtatgatatataatatacatttataaatacacatttatattattttatataaaatatatataaaatctccaagttgctttttccaaaaaggtgtcttgctgcatttcaaacattcatttaaaaacttgaatgctggtgatctggtccagaatgtgttcagtagctgctgccagtggccaagcatctcgggagatgtctacaaaacacgctggttctggcctggcgtggtggctcacgcctgtaatctcagcactttgggaggctgaggcaggtggatcaactgaggtctggatttcgagaccagccttgccagcttggtgaaaccccatctctactaataatacaaaaaaattagccaggcgtggtggcatgtgcctgtaatcccacctacttgggaggctaaggctggagaatcgcttgaacccagggggcagaggttgcagtgagccgagatcgcaccattgcactccaggctgggcaagaagagcgaaactccgtctcaaaaaaaaaaaaaaagatgctggttcctaaaatgtggcccttttcctcctcacctgctgccagaccatcagccgcgccttcatgaacgggagctcggtggagcacgtggtggagtttggccttgactaccccgagggcatggccgttgactggatgggcaagaacctctactgggccgacactgggaccaacagaatcgaagtggcgcggctggacgggcagttccggcaagtcctcgtgtggagggacttggacaacccgaggtcgctggccctggatcccaccaaggggtaagtgtttgcctgtcccgtgcgtccttgtgttcacctcgtatgagacagtgcgggggtgccaactgggcaaggtggcaggctgtccgtgtggccctcagtgattagagctgtactgatgtcattagccttgatggtggccaggactggtagggccctcagaggtcatggagttccttcgtggagcgggtgctgaggctgtatcaggcacagtgctggctgctttcacctgggccgtctcaccgaagtgtccatggagcctgcgtagggtgggtatctgtgtcgattttacagatgcagaaacaggctcagagaaaccgagtgacttccctaaggtcacatacccagttagagcagagctgggccaggaagtgctgtctcaggctcctgaccaggtctccttgctttgcactcttgccaaaaccatgatccagaactgactttgaggtccccggacctcaggctcctccgaaatggcctcttggaggctgctgagccacagcttaggacccacctcgagaggcaaatgtgctttgagctgccaggcgtcctgggggccctgccttgggcacggggttcagacaggccccagatgtgtggggcgtctttctggacttgagttttcttttctgtgtggtggacacagtgctcaccccttaaagcacctgtgatgtgtgcagcagcccaatccctgcctgtcgcctgttctgctagggaaggaaggaatacttcaggatggcaggacaacagaaagaggtccaggttttagagcaagggcaggtcaaacttagaaaattctggaatgaggatgtgcatttcctcttctggatctgctaaaagaagagggaaggaggggctgctgggggaggagcccagagccgagtttacatccggatcccgcaaggcctcccctgccctgaggtcttgttttgtgatgtgcttgtgtccatcctggtttctgccgtgtccccaacatccggccaagcttaggtggatgttccagcacacactcaccctgtctgtgcacctgtttttgtgtccgtaagtgggtatttactcaccttacgagtgagccactgtgggaattcagggaggtggcgcagtgaccacccctggagggatatgtgtgtggcaggggtcgagggtctcgcccttccctgcttcctgcgcgtggctttctccaggacggggagggctgagctgaagaggtggggacagttgcgtccccccgccacccactgtcctgcggtgagagcagactcactgagcctgcccttctcccttgtgccttccagctacatctactggaccgagtggggcggcaagccgaggatcgtgcgggccttcatggacgggaccaactgcatgacgctggtggacaaggtgggccgggccaacgacctcaccattgactacgctgaccagcgcctctactggaccgacctggacaccaacatgatcgagtcgtccaacatgctgggtgagggccgggctggggccttctggtcatggagggcggggcagccgggcgttggccacctcccagcctcgccgcacgtaccctgtggcctgcaagttccccaacctggcaggagctgtggccacacccacgactgcccagcagcctcaccctctgctgtgggagttgtccccgtccacccctgggtgcctttgctgcagttatgtcgggagaggctctggtgacagctgtttcctgtgcacctgctgggcactaggtcccagctaatccctgtgccaggactctaatttcaccctaacacacatggtggttttcattgctggggaagctgaggcctgagcacatgacttgccttaggtcacatagctggtgagttcaggatcccccagagataccagggccagcactcgatccccacccagccctgaaccccaccatgtgctgggattgtgctgggagtgtccacacgcctgggaccccagggctggtgctctcatctcctttttccagatcatgagaatgaggctcagggaagtttgaaaaaaacctatcccaagtcacacagcaacaggagcaggatttgaacccagaaaaggggaccgcacactctgttctgctagagtagttagctgtcctgggtgatatggcaggtgacaggggcaactgtgcttaacaaaggaacccccatcccccctgccaagttgggagactagaaggtcaggggcagaagctctgaagggccaggtgcagtggctgacacctctaatcccagcactttgtgaggccaaggcgggcagatgatttgagcccaggagttcaagatcagcctgggtaatgtagtgagacgccatctctacaaaaaaattttttaaaaattagctgggcatggtggttcatgcctgtagtccaagctacttgggaggctcaggtgggaggattgcttgagcccaggaggttgaggttgtggtgagctgtgatcatgccactgcactccagcctgggcaatagagtgagaccgtctccaaaaaaaaaaaaagaagaagaaaaagaagctctgaggctccaagtccccaggcaccccttggcttgagggcagacaagggaggagagggtcacctgggcagccctgacttttgtcccctggcaaagggaccttcagtgaccttggccctaggagagcctctgagcacgtcagccatgtcgaaccgctcaggaagggcagcaagaatttggcttctgacctctgcctctcctactcgccatctgcactgggtgtggttgtgcccattttacagatgaggaggctggggcatcgaccagctgaatgccttgtcccaggtactgcgtaggcagagctggcagttgaaccccgtgtcctggttgtcgctgggggtgggctgcaccctgacttgtgaggccagtagcaaggtttgcacgtgacttcgtgaccgtcacccagctctgcagcacatcccgtgacccagctcatccaggccgcatgcaaacctgttgccaggcgagaaaccagtcaccgcacagctgtggttgcctgaaatgattaagctcattaatcaccccggagtgaggacagactcagatgaaaaccagcaaaagccctggaaactcatgtgaccctgccaatgagggcggccatgtgcattgcagcctggccgtcactcctcggtacgtgttttggacttaaacgctccggatgtttactgagtgcttgattaataacatggaaggcctggtctcattgctgtgggagtgaaggatgcacagccaggcctgacatgatgagaacaagaacctggagtctcgctgcctgggtggtaatcctggccctgccacttagcaactgtgtgactgtagccaggtcacttaattttgctagatcctgcctgcgcttcagtggatcttgctggttttccaaggtggccaaacactttaaggcattcatgtggtcgctaggctgcagggttgaaccctggctcaccccgcagggcgccgtgtgctctgtggcctggctgtgcctttgctgacaccgtgcccgtgtgtgttcatgcaggtcaggagcgggtcgtgattgccgacgatctcccgcacccgttcggtctgacgcagtacagcgattatatctactggacagactggaatctgcacagcattgagcgggccgacaagactagcggccggaaccgcaccctcatccagggccacctggacttcgtgatggacatcctggtgttccactcctcccgccaggatggcctcaatgactgtatgcacaacaacgggcagtgtgggcagctgtgccttgccatccccggcggccaccgctgcggctgcgcctcacactacaccctggaccccagcagccgcaactgcagccgtaagtgcctcatggtcccccgcacctcactccctcgttagatcaggctggttctgggagctgacgctgaaaggagcttctcatctggggttcctgggtgtacatagatggttgggtaggttgtgcactgcacaagctgcatgatgctacctgggggtccaggtccaggctggatggacttgttgcttcatcaggacatagataaatggccaaaactcctcagctggaaggtcctgggcaggatctttgggtgtgaaaaccagtcacaggggaagggtgcttgctcatactgccagcacagtgctgagtgctttccatagcgctcgtttactcctcaagcctggagggtggggagtagcatggtcccatttcacgtacaaggaacccgatgcacagagaggtgtggcaacccatccaaggccatacaactggggtgggttgagccggggttgactgtggcaggctggctcaagagtccctgctcctgaacccttgccaggcagcctggcatcagctcggggaatttttgccctgacccttggaagcaagtgggcctctttgttctcatgtcagtgatgagaagagtgactttcctatggcccctctggagtacaggtgtttcctgttggcgggctcttcccccatgacatcagcagcgagctggttatgattccctacgcagaacttgatagtttataaagctctttgtcatccaggccccgttggagtctcacgcagacctggtcgcaggcggggctggtcttgcctgtcccagctgcatggatggggaacttgaggcttgcaaaggttaaggggctgttcgaggcccacgctggcaggagatgggcctgggccagagtctgggacttcccatgcctgggctgtctttggtcctgttgctcaccatccctccctggggccatgaccttagagagccaaatggaggtgcaggtaacccacggcaaggaggggttgccatgactcagagtccccgtcctgtggccggcagtacctggtgcaacgacttggatttcagaccagccactgtagcccgctgacggtgcgctcgaagtgccacagcttctgaagccaggcaggactcaggccaggagactctgttagctgttgagagggagaggccaacggatgttctggttctgctagagagctggttcttcggatcctggtaccagtgcactgagaggaggcccagcttgattctggggctgccttgtggtggcatgtgctgctcactgacaccctcgaggagtgtcttctctcgggcttgttgactgtgcccggttttccgcagttcactggtgcacacataggcacatagcaaaccgcacacacagtcgtgggtatgagtttcactacattccaccaccagtgttcactaccattacctgccttccgtcttaagtgttcatcatttaaaaataaatttattgggctggacgcggtggctcatgactgttatcccagcactttgggaggctgaggcgggcagatcacctgaggtcaggagttcaagaccagcctggccaatatggtgaaactccatctctactaaaaatacaaaattagctgggcatggtggggcatgcctataatcccagctactcaggaggctgaggcaggagaatggcgtgaacccgagaggcagagcttacagtgagcccagatagcaccactgcagtccagcgtgggcaacagtgcgagactccatctcaaaaaaaaaataaataaataaaagaaaaataaatttatgatctatttcaaaaataacacatgtactttgaaacagcagagacacatatgacacggagaatgaaattccccatagcgcacccccaagagacagccctggtccccccgtctttcccgtggacctccagcggggcagatgctgagccgcctgttgtcgagtggcatgctatcccgtcctccagctcctctgtggcttacagacacccacctgcagccctgtctttgcctcctctagcgcccaccaccttcttgctgttcagccagaaatctgccatcagtcggatgatcccggacgaccagcacagcccggatctcatcctgcccctgcatggactgaggaacgtcaaagccatcgactatgacccactggacaagttcatctactgggtggatgggcgccagaacatcaagcgagccaaggacgacgggacccaggcaggtgccctgtgggaagggtgcggggtgtgcttcccaaggcgctcctcttgctggtttccaggctgctgcccctgtccttagcagagggaggaaacagaggatggctctgggtgaatgatgacttgggcttcgattatgtagtcacagggtatgaccctgagatgcgtggaaccccgagactgtgattatatgtagaaactgggtttccccgttgtttaagtagtcatggtggggtcagaccccacaggacttttgtcttttcaagaaagaaaatggtcgtgtgtcatgcaggggtagttggtactggttaatccaggtttatcctttattttgtgggaactgtacagtcatttctgctacaatgctgtatatgctcttctgaaagacacctatgcaaaatcgcacagtaaaaatgacacaactcatagggaaagcggggccagggcacagccctcaaaatctccatcaatgacatgtaagaaaagagaggaacctgggaaatagcaaagtgccttttgcacattaaatggttagctatatcccacaatactgtgcattcgtaaacgttaatgctgcaataaatacggcacttcaccttgggaagatctggagttggcttatgagtgtggaagggtgtagcgcatgagtttttgtgaaacactggaaggaggattgtgggaaatcaaatggaaagttctcaccccaggcgtggagaagagtgggtcatggccccagcagtgagcccagggaggtcagagacggaggtgtgtgtgtgggtgtgaccctgcgcagttccctgccggctgtagttttttgcattcgcttaatgtttctcgtggaggaaattgtgcatgagcaaatgtgaaaccgtgctgtgctcaaattgtcctaatacatcattgcattggaacagattggctttnttttttttttttttttttttttttttttgaaatggagtctcactctgtcaccagcctggagtgcagtggcatgatcttggctcactgcaacctttgcctcctatgttcaagtgattttcctgcctcagcctcctgagtaactgggattacagggcatgagccaccgcggccggccagatttgcatttttgaaacaactgctaggctgggcgcggtggctcacacctgtaatcccagcactgtgggaggccgaggcaggtggatcacctgaggtcaggggttcgagaccagcctggccaacatggtgaaaccccgtctctactgaatatacaaaaatcagctgggtgtggtggcgggtgcctgtaatcccagctactcaggaggctgaggcaggagaattgcttgaacccaggaggcagaggttgcggtgagccgagatcacaccattgcactccagcctgggcaacaagagcaaaactccatctcaaaaaataaaaaatagaaaaacaagtgctgtagcggaagtgagcactttgcggagtcaggcttgtgtggcctgttccacaaatgatgtgctcacggtggcctcaggcccacctggagtctgcagcatggggcacaacaggttcattagtgtagaattccaggacaggcctggctcctaagcagccttcttttacaaaaactgcagagcccgcctgtatcgtagcactttgggaggccgaagtgggtggatcacgaggtcaggagttcaagaccagcctggccaacatggtgaaaccccatctctactaaatatacgaaaattagctgggtgtggtggcacgcgcctgtagtcccagctactcgggaggctgaggcagaattgcttgaacctgggaggtggaggttgcagggatctgagaccatgtcattgcactccagcctgggcaacagagcgagacgccatctcaaaaaaaaaaaacctacagagccacacggcctctttctccaccgagtgttggtgtgggagcttgtgttattgtggtgaaatcttggtactttcttgaggcagagagaggctgagcgcctggagagactttcacatgggtcgccatgtccgccgtcggtttcgctgttgtgctccccatctgaaggctggtgccgtccagacaggctggacgcccctttccaccagatccttcctcccgcagcagtttctagttacgttgtactgtgaggtctgtgtccttggttgatggcaaaagtcagccgaattgaaattcagagccatgcctggctccctggagcttctctcctgggcagctgtgatcattgcctctgctgtggtgtgggtggtggaaatggattcctttcatcttgcttgctacaggtgactgtcacgtggagtcctttggagagagggacgtgttaattgatggatgtggctcccatgctgagaaagctcctgggcgtacattgccttagagtttcattggagctgcgttcttttatggtgtctgctaggcagaagtgatgaagacttggaagaaaacccagaaggttttccacttaatttggaaaatgtgcttttcccctcctgtgtcttttgctaaggtccagcctcctgcagcctccccgctctgtggactctggctttgattctttattaggagtccccctgctcccccaaaagatggtgtctaaattatcatccaattggccgaggttttgttttctattaattgtttttattttttattgtggtaaatttatataacataaaatttgccattttaattgttttgttattgttgtttttgagacagggtctcaccccagtgcccaggctggagtgcagtggtgcgatcatggctcactgcagcctcagcctccagggctccagtgatcctctcacctcagcctctctagtagccgggactacaggcatacactaccacatctggctgattttttgtattttttttttattgtagagacccgctatgttgcccaggctggtctcaactcctggactcaagccatcctcccacctcaccctcccaaagtgctgggattacaggcatgagccacaacacccagccattttaatttttttttttttttttgagatggagtctcactctatcgcccaggctggagtgcagtggcgtggtatcaactcactgcaacctctgcctcccaggttcaagcgactctcctgcctcagcctcctcccgagtagctgggattacaggtgcccatcactatgcctggctaatttttgtattttttagcagagacggggtttcaccatgttggccaggctggtcttgaactcctaacctggtgatccgcccgcctcggcctcccaaaatgctgagattacaggtgtgagccaccgtgcccggcctttttttgtttttgagacagggtcttgccctgtcacccagactggagtgcaatggtgggctcttggctcactgcagcctccgcctcccaggctcaagttgtgcacctccacacctggctaactgtattttatgtagagacagatttcaccatgttgcccaggctgggcttgaaatggactcaagcagtccacccacctcagcctcccaaagtgctgagattacaggcgcgagccaccgcacccagcccattttacctattctgcagttgacagttcagtggcattcagtcagttcacgaggtaaccatcactgccattcatctccagactacttcaccttctcggcagatgtccgaaactgtccgcattgaacacactcctcatctccctctgacagccaccattctactttgtatctctctctgccttctctaggtacctcatgtaagtggaattataccaatatttgcccttgtgtgactggcttctttcatgtgacatggtgtcctcaaggttcatctgtgttatagcctgtgtcagaatttccttccttaaagcctgaataataacccgttgtaaaggctgggcgcggtggctcacaccctctaatcccagcattttgggagtccgaggtgggcagatcacttgaggtcaggagtttgagaccagcctggccaacatagtgaaaccctggctctactaaaagtacaaaattagctgggtgtggtggcgcgcacctgtaatcccagttactcaggaggctgaggcaggagaatcgcttgtacccgggaggcagaggttgcaatgaaccaagattgtgcctctgcagtccagcctgggtaacagagtgagacttcctgtctcaaaaaaaaaaaaaatcatcggatggatggacggaccacttcttgttatttatccatccacgggtgctaggtttcttccacctttggttgtcgtgaataaggccactatgaacatttccttccgtggtgaaggttttgtactagtgaggaaaaggcgtgtttgtggtgttgcataggattctggtaagaaagtttgcactaaccataagtatttgtactacattaaaatgaaagctcaggggccgggcgcggtggctcacgcctgtaatcccagcactttgggaggccagggcgggcggatcatgaggtcaggagatcaagaccatcctggccaacatggtgaaaccccgtctctactaaaaataccaaaaaactagccaggtgtggtggcgggcacctgtagtcccagctacttgggaggctgaggcaggagaatggcgtgaacccgggaggcggagcttgcggtgagccgagatcgcttcactgcactcgagcctgggcaacagagcaagactccgtctcacgcaaaactctgtctcacgcaagactccgtctcaaaaaaaaaaagagttcagggtttatgaaactggccagccgcgtaaagtttgctgtgttgtttttgtgcccgggaggagtgtggccagggtgtcacgtcacacagtacacgtttctcagatggtggttctccagactgctgtcccaaagtctgtttttgcatctggttcccacagacccaccctccacggtgagcctgattttggccagggtagctggaatcttgcttgtctttcagcccggcagctgtaccagtccagggtccacagctagtggcttttaggaaggaatttgttcagttggctttgacacatggccccctagggtccacagctctgtagtgatgtggatgttgttatctacaaagacacatgatccttcgtgtccagatgaaagtgatgatgtctttgcagctgcccagcaaggctgtgtgtgtgtgtgtgtgtgtgtgtgtgtgtgtgtgtggtgtgtgtgtggtgtgtgtgtgtgtatgggggagggaggcaccctttccatctgggggtgtgtgtgtgtggggtgtgtgtgtgtgtgtgcgcgtgtgtgtggtgtgtggtgtgtgtgtgtgtatgggggaggcaccctttccatctgggtccaagagactgggcctggggaagacgcttctttttatctacttagagactttgttttatttgtatttttttgagacagggtctcactctgtcacccaggctggggtatggtgatatgagcatagctcactgcagcctcggcctcccaggctgaagcgatcctcccacctcagccttctgaatagctgggactgtaggcgtgcgtcaccatactgagctattgttttttttgtttggttggtttaattttttttgatacagatggagtcttgctatgttgcccagactagtctcaaactcctgaactcaagtgattctcccacctcagtttcccgacattctgggatcacaggtgtgagccactgctgtctccctgttttattaactgctgaaagacctagataaagaaagtctgaaaagacttactatcagagcaccatcctaagatgattccctctgactcaatggagagggaggggagcttttccttcaggcctgggtggcaggagcccaggtgctccaggccccatttgccccaggccaaatcactcgggaacttggatgcagctgtctttcagggtaacccaaaggaaccagatccccgcaggcagtaggcttctgggctgtcctctcctcctacgtcagctcagtaagagcccttcgaagggatgctgtgtcggaggccccaaaagcccaggctcatccctgagatgcacagggtgggctgggcttaggcagcgctcgagcatctcctggacggtgaccccagagagtgtggagacggagagtccttgagagtcactgagagacgtggctgccctgccttcccaagaggggctctgagtcattccccacactcacctgcccctacccaccctcacctggcccccagcctcacctacccccacatctgtaccgatccctttacccgcaccttccctacccaccctcacctcccctgtaccttcacctcccccactcacccgcccctgcaccctcacctgtcccccaccttcacctaacccccaccctcacctgccctcccctcacctggcctccttccgttggggaaggggttgtaaggggcggcccccaaactgtctgtcctggtgccctgcagagaaaacagtacgtgagggccgcagtccaaaagcttgagtcctggaaggtggaggagacagggatgtgttgggaagggccccatggtcttggatcccttctcgactgtcaatggggccttcatgggagcgccagtctagtgatgcacagctgggtgcccggcgggtggctgaggaggcctaaagtccgaggcggcaagagctcttccagaggctgttgtcctaatcgctctggcatactcaggcgggcacgtagttaggagctgattggagaggagagacccccacaccaatactgggatttgactttcaggctaaacttgagaagtgtggcctctgctgtcctgccagagctctccagccagtgcccagggctctccagccagtgcccgggggtctccaccagtgcccgggggtctccgccagtgccaggggtctccgccagtgcccaggggtctccgccagtgctcaggagtcttggtttctttgtcttacagccctttgttttgacctctctgagccaaggccaaaacccagacaggcagccccacgacctcagcatcgacatctacagccggacactgttctggacgtgcgaggccaccaataccatcaacgtccacaggctgagcggggaagccatgggggtggtgctgcgtggggaccgcgacaagcccagggccatcgtcgtcaacgcggagcgagggtaggaggccaacgggtgggtgggggtgctgcccgtccaggcgtgcccgccgtgtcttctgccgaatgccagcctctcacaggctggggagactttccaccctggggatccaatgggtggctttccagggtcccaaaagcaaacacaggctctttcacagcccctccaggaaagcagaaagccccaagggctggaagggaagggggagctctgctgagaggttacaaggcagcgctggccgacgggagttgcagttgataggttttgtatcatccttgttaaacttgaaccctgtgcagaaatcccttccacggcatgggggctgcctgttgactcgctcctgttccaccacagggagctcctgggcttcttcctcccagaggcccccgacgctcccacctgttggtcgtcagagcttctggttggtgggaaggcacccaggaccttgaggtctccagagagaaaagccagggaaagagggagaccgaaacccatgtgacatgaaactcaggctccaaactgagcacgggaacgtttggggacaggagcgcgatggccttcctcagatagctggggggctggcatgaagacgggagctacagccagcacaggtcctgggccgggagcccagagattgagccctgactctgtcacttactggccacgtgaccttgggcgggtggcatagcctcttggagactcagtttcctcattggtaggagtgacggccacagtggtgcggcctctgcagcacacggggggctcggtgggcggaagccccgggtctataaggcggctgtgcaggagccagccgagctggtctcccaacagccagggctccggggtccttagcagctgtggggggcctgcacctgtttcccatggctgctgtcagaaattaccagaagccaggtggctgagagtaatggacacttgttctctcacagttcctgagggctgaagcccgagatcgaggtgtgggcagggccctgcgccctctgaaggctctgagggaacctttgggcttctggtggctccaggcaccccttgacttgtggtcctgtcactccagtctctctgtctggctgcacatggcgtggcctcttctgtaccattgaaggacacttcagttggatttagggcctaccctcacccattgtggtcgtatcttgatccttcatgacatttgtaaagaccctgcttccaaataagctcacattctgaggttctggggtgagcgggaatttggagagcattgttcaactagtatagaatgtgacctgtcagcctcgggcagccctgagaggcaggggctttccacagcccagctgggtgccctgggctccgtgctgtccgaggagacgccatccccacacccgtccttcacccgccaccctcccgcaggtacctgtacttcaccaacatgcaggaccgggcagccaagatcgaacgcgcagccctggacggcaccgagcgcgaggtcctcttcaccaccggcctcatccgccctgtggccctggtggtggacaacacactgggcaagctgttctgggtggacgcggacctgaagcgcattgagagctgtgacctgtcaggtacgcgccccggggcctgccctaaccgcagacacccggccttcattgtcagtaatggcagcagctgccacattgtccgagacctgccgtgagcccagtgccgcgccaggggctttgtgtgtagcgtgttttgtcctcacactgacagctgtaggctggggttctgagtgagccccacagggcagaggcagaaaatgagtctcagagagggtgagcgagctgcttggggccccacagcaggagatggagcaggactgcagcctagcctctgcccccagcacctgcgcaagaagctgctctgctctggactgtgttaggctgcgagggctggagagaaatgagagttggtgcttagagagggggcgcaggtccccatggcttttcctcttatgatgaggtagatgggtgaagggaggggccatgcttgcaggggccagtgaccgaggcccgccgttggaactgatggccttcatcccgagcccagcccaggtgggagcagggctttccgagggcttgtcttgggtcggcctgcttccagggactctgctgcagctcccacccctgtccaaagcatggaatcccccaggctccctggcagtcctgtcaacctctgtcctcccaagctgagtgtggggcaagttctggaggtcagcactgctcaggggggcccacgggctgcttgcaggggccaaccgcctgaccctggaggacgccaacatcgtgcagcctctgggcctgaccatccttggcaagcatctctactggatcgaccgccagcagcagatgatcgagcgtgtggagaagaccaccggggacaagcggactcgcatccagggccgtgtcgcccacctcactggcatccatgcagtggaggaagtcagcctggaggagttctgtacgtgggggctggcagtggggtgggcagggtggcctctaaacccgacccctggaggaggctggaggccagtgcaagatcctgtgtggcctcagccaggcggtggtctctgccagatgccaactgttgcccgctggggttcagcgacatgtccgaatgtcccgaggcctctgaggttgttttcttttgccgcagaacaaatcaccacgaacagcgttttaagacaacaccaactcttttttttttttttttttttgagtcaggatcttgctctgttgcccaggctggggtgccctggtgcaaacacagttcactgcagcctcgacctctgggcttaattaagtgaacaccttgcctcagcctcccaggtagctgggactacaggtgggcaccaccacacctggctaatttttttttgtagagacggggtttccccatgttgcccaggctggtctgcaactcctgggcacaagctatctgcctgctgtggcctcccaaagtgctaggattataggtgtgagccactggcctgacaacacccacggattgtctctcagttctgtaaggcaaagtccaggcacagcgtggctcacctgggttctctgctcagggtctcacggggccagaatcaaggtgtcaggaacgctgggccctcagcggaggctctgtggagaaattagcttccttgctcactcagcaggtagcagttgtgggatcgaggttctgttttctctctggttattggtcggggaccactctcagctcctagaggccaccccaggtccttgccccgtggccctctctgcctcagcagtgggggctccctgcgtcagtccctcccgcaccttgagtctctctgatttgcttctaaagggccctgtgattcggctcagccacctttagattaggttagcctcccctttgatagactccaagtcggctgattaataaccttactcacatctgcagaatcccttctgccacataaggtcatgacgccgtgctggggactggggtgggaaattacggggtcatttaggattctgcctgccactgccttgctgtgtcccagggcttgggggaggggcctccacagctgggaccacagtccttcctcccctccatggtaaccatctgaggattacttgagaccagcctgggcaacatggtgagaacccatccctacaaaaaatacaaacaaaaagggaccaggctgggcttggtggctcatgcctataatcccagcactttgggagaccaaggtgggctgatcacttgaggttgggagttcgagaccagcctgcccaacatagtgaaatcccgtctctactaaaaatacaaaaattagctgggtgtggtggcaggcgcctgtattcccagctactggggaggctgaggtgggagaattacttgaacctgggaggcggaagttgcagtgagccaaaattacgccactgcactccagcctaggcaatagagtgagactccgtctcaaaaaaaaaaaagggccaggggtggtagtgacaaagagaccctatcccaaaaaaaccgaacactgaatccttgagactgagtaaggacactgtgaaatttttctgggtggggcagggaacagagcgtcttctgtcatttcttccacctgggtgtggtcagctctccctccaagctgcctcctcttcttctcattgtccgggtgttggacacatttggttaactggatagaataacgcgagttcccagggacttggtccatttgctattttattttattttattttattttattttatttatttatttatttatttatttatttattgagatggagtttcgtttttgtcgcccaggctggagtgcagtggcgcgatctcggttcactgcaacctctgcctcccaggttcaagtgattctcctacctcagccttccaagtaactgggattacaggcacccaccaccataccaggctaatttttttgtatttttagtagagacgggttttcgccattttgcccaggctggtcttcaactcctagcctcaggtgatccacgcacctcggcctcccaaagtgctgggattacaggcatgagccaccacgcctggcaccatttgctattttaattcccatgtgtattagtgtcccacggctgctgtaacaaatgaccacaaactggatggcttaaagcaacagaaatggattcccccaatgtgctggagaccagaagcctgcgaccaaactgttgggagggctgtgcttcctctgggggctccagggaggatctatttgttggcccttccagtgctgtgggtgccagcgttccacacttgtggatgcgccgcctcaacctctgcccatcttcatgtgtccatctcctttgtgtctgcgtctttacctcttcttcttgtctgtgttgcctcttataaggacgtttgtcattgggtttagggcccacccaaatcatccgagatgacctcgtcttgagatccttaacctgcaaagaccctttttccaaaaaaaggttatgctcacagattctaggccttaagacatgggtgtatctttctggggggcactatccaaccccttatacaatgaaagacgggaagagggccaggtgtggtagttcacgcctgtaatctcagcactttaggaagctgaagcgggaggatcacttgagcccaggagtttacaagtagctaggcaacatgatgagaccccatttctacaaaaagtaaaaaaaaaaaaaaaaaaaaaaaagccaggtgtggtggctcacacctgtaatcccagcactttgggaggctgaggcaggcagatcacgaggtcaggagattgagaccatcctggctaacacggtgaaaccccgtctctactaaaaatacaaaaaattatggccgggcgcagtggctcccgcctgtaatcccagcactttgggaggccgaggtgggtgaattacaaggtcaagagatcgagaccatcttggctaacacggtgaaaccccatcaagatcacaaggtcaagagatggagaccatcctggctaacacggtgaaaccccgtctctactaaaaatacaaaaaattagccgggcatggtagcgggcgcctgtagtcccagctgctcgggaggctgaggcaggagaatggcgtgaacccgggaggcggagcttgcggtgagccgagatcgctccatgccattgcactccagcctgggtgacagagtgagactccgtctcaaaaaaaaaaaaaaaaagaaaattagccaggcacagtggcaggtgcctattgtcccagctacttgggaggctaaggcaggagaatggcatgaacccgggaggtggagtttgcagtgagccgagatcatgccactgcgctccagcctgggcgatagagcaagactctgtctcaaaaaaaaaagccaggcatggtggtgcatgcctgtagtcccagctactcaagaggctgaggcaggagggttgttcgacccacggagatcaaggctacagtgagccatgatcgcaccactgccctccagcctgggtgacagagtgtgaccctgtctcaaagtaagtaaataggaggagagacaagtgggcagttcagactgatggtatgggcacagtagagactggtgcagacaggctggcctgtgatgtcaagcaacttctgtaactgtttccggcatccatttgtgtgtcaatttccgtgtcagtaggaagactctgtaggctgccaagaggaataagtgggaggatcctcccagagaggccgggcctgcaggagggccagttctcatgagttcttatttggcccctaccctccaggctgtggttctgaggtgggagacagagcctgacctctgtttgtcttgttttgtctttgcagcagcccacccatgtgcccgtgacaatggtggctgctcccacatctgtattgccaagggtgatgggacaccacggtgctcatgcccagtccacctcgtgctcctgcagaacctgctgacctgtggaggtaggtgtgacctaggtgctcctttggggtgatggacaggtacctgattctctgcctgctaggctgctgcctggcatccttttaaaatcacagtccctgtggcatccagtttccaaagctgattgtgtcttcctttgccctcctttcttttctactatgtgcattcggtgctatgaattttcctctaagtactgcgtttcctgcatctcacaaattttgttacattttcattttcaggtagtttgaatatttttacacttctcctgagatgacatctttggctcatgtgttatttagaagtgttgcttagtttctaaagagttggggcttttccagctgtctctctgcaactgatttctaatttaattctactgtagtctgagagcttattttatatgatttctgttattttaaatgtgttgggtgtggtgtttttgttgttattgtttttgtgtctttttgttttgttttgcttcgtttgttttgtttttgagacagtgtcttgctctgtcactcaggctggagtgcaatggcgcgatctcagctcaccgcaacctctgcctcccgggttcaagtgatcctcttgcctcagcctcctgagtagctgggattacaggtgcacgccaccatacccagctaatttttgtatttttagtagagacggggtttcaccatgttggtcaggctggtctcgaactcctgacctcgtgatccgcccacctcggcctcccaaagtgctgggattataggcgtgagccactgtgcctggccattaggtgtgttttatcacccagcatcatgcagtttatcttggtgaatgttctgtgtactcttgaaaagaatgtggattctgctgttgttgggtggagtgttccagaaacatcaattagatccagttggttaatagtgctcatcaggttgtctctatccttccttcctgactgcctgcttgagctgtcagttattgacaggggtgtggagtctccaactctaatggtggatttgtttatttctcctagtagttctatctttttctctccttctacccttgatcctcttctccccctagggcttcctggtgttggtggtgggagagtggggtagtgaagaacctggactttagggccaaagaggccagggttcaaatcctggctctgtcacttcccagttgagtgaccctggctggtgcctgaatctctgtgagcctccacttcctcctctgtgaaattgagagcacttacctggcaggctgtcatgggcatcaagtaacagggcactccacctggaccctgacacgtgatgcacaggaatgccagctgctatgccatgggtgtggcagtagtaataaagtgaccatctgtatcctcaccacagtgaagcctgtccagggctttctctcctatgcccccatgcctccaggtggccttggatcctgttggttctgtgctctgctcagcgacctttctcccgtgggagttcctgggggttcagcttcatcctacagacagcagcacacactggctgtgcacccttttttttttttttttttttttttttgagatggagtctcgcttttttcgcgcaggctgaagtgcagtggtgtgatcttggctcactgcaacctctacctcctgggttcaagtgattttcctgcctcaccctcccaagtagctgggattacaggctcccaccaccacgcccggctaatttttgtattttcagtagagatggtgtttcaccatgttggccaggatggtcttgaactcctgacctcaggtgatccgcccacctcagcctcccaaagtgcagggattacaggcgtgagccaccacacccggagtgccggttgtttttagcagtttgtcttgttcctggagagactggctcctgcccaggagctcggggagtagggccgcggggtgctgcctcacacctcgagtttggccgtaagcagaggggacattttgtgactgtccccctcctgagcttcccagcagcttttctccaagttacagcccaaaagctcaggtggatttgcaacccaacggtgtctgtgcacctcccactgatgcccgaactgccctggccaagaaacggggccgtcagaacgctgcactaactgcagccttgggcctccatgccagaggccatgcccttccatccaccaccccctggcctgggccctggccctcctggctcgggaactccaggccccttcctcacggatcgagagacgtgtatttaccgcacaggtgcttgtcattctcttgtggcctcttctccagggagatcacagaaggacagggcctcactgaggtctcggacatggaccctttgatagtggcaggagccaggctgggcaagaggcggccacagtcacctcagcagtgccatcaccaccgccattcagcccttccctgagccgggcgcgcccctggctctggccccagtgtcccagttacagctcacaggagcttgtggtgcccagcggctgcttctgattgagagtcgaggtcggaggctttgggaggctgagaggctgctcggtttcacaactgctgagggagacttgggctccatctcaggtctgccccatgtcgccctcaacctccagccaccggtcctccgtgtcccccatggccaggcacggcttgcagacatctgtcgttggctcctctcagccgtcgtgggctgaccctggcacgtcctcctgtggctgagcccagtggggacagctgcttccttttattaccctagaactctcgtctttgatcaggccccctcccctatgccacacagtccctgtcactcgggtgagcccagtagtcatggggaaggcctgcgggttccaaacatccaaaggcttgcgtgcagcatgacagcttgaaaccgatgttttttaccttgatcagatttcagcttggcgggggctttgctcagctttcagtgaggcctgggccgatttcccagcatcccctcctgaggccagcctctgtttcctgtgattttctgcacaaagtgggagggaggagtcttaggaaatggggggccacctcgaaacctaggcctcctctggcttctctgtgccagtgcccccacgctttgtgtctgtgtccccagcccatgggactgtgttattccctgagtgctgccgcatgcccagcccgcactgaggacgtggagccccgaggggcaggatggcctccatggtcacacgtaggaagtggcctccaccctccgatgatcctctccccccctccctttcagcgccttccccgggggtgtcatcagccctcctgcctgtgctttgtcccgtcttctgcaggcgcatgggacgtgctgacaggtcctctgccgggttcctgccttgctatgcgcacgctggtcaccacagaggcctggcccttcttctgtagcagtcccacacccgcaacaggtgtggctgctgaccacctgctttctgcccctctggtcctgaggagggcgcagtgggcactcaggcgtggctgagcagatgtgtgttgccgggaggaggaaggactgctccagtcagggctgaatttcccacccggagcatttctgctgtatttggtgtagcgcctgctgcttaaagctctgattcccagttggcaccctttcccttctgcattgaaaaacatacggatgcatgtcttcttgcagtgaatgtgtattctcccagcctctcttctgggttggggctggaggtggagcggcacacaggagccgcagcgatggaggatgtgcgggtgcagcaccccgtacagcagggatgccaaacccgcgctgagtccctctcaacttctgctttgaagcccagtcacgccattgcctgggttttgctgggcggggctgcatgtgatgttctcctctgtccctcccccagagccgcccacctgctccccggaccagtttgcatgtgccacaggggagatcgactgtatccccggggcctggcgctgtgacggctttcccgagtgcgatgaccagagcgacgaggagggctgccccgtgtgctccgccgcccagttcccctgcgcgcggggtcagtgtgtggacctgcgcctgcgctgcgacggcgaggcagactgtcaggaccgctcagacgaggtggactgtgacggtgaggccctccccgtcaaggctctgccaagaccctggccctgccctccgggatacgagcttggggctgcctccggcctcacaggagtaggggctctgaaaacctttgcttgcagggagattgccaagtctgtcttttaggcccaacaaggaaaactctgcagttccacccatcctgtcccaccaggtagtgtggcttgaaggcagactgtgagggtctatctcaccttcctgcattaggtcaggagtttcacagaaacctgaggcacattcaggggtgggctgcagaggtccatggctcacaccctggaaaatccgcccccaaaagacagtgctgtctccactgaccagtctgtgggatagtgcttaagcctgagtggtttctatcaacatgtagaatcaggaggtataaagagatttgctcaggcatcctgggccctctctgaccagcaggatcttcctttagatcttgacagtgaaacacatctcttctgtgccccctgtgagttttctttcattcattcattcattcattcattcattcattcattcgagacagagtcttgctctgtcacccaggctggagtgccctggtgtaatctcggctcactgcaacctctgcctccagggttcaatcgattctcctgcctcagcctcccgagtagctgggatgacaggtgcgcaccaccatgcctggctaatttttgtatttttagtagagacagggtttcaccatgttggccaggctggtctcgaactcctgacctcaggtgatccgcccgcctcagcctcccaaagtgctgggattacaggcatgagccaccgcgcccggcctgagttttccttttatgaaggacctgcttggttggttgcctgccacatgttgtcagcaccatgggcccaggactgctgaggagctgttgatgccctcgctctcccagagccaccggctctgttagataattcacatgcagtctggccactgtcctacgtcctcattcacaaagagcagacatttcgtagaagatgagggcctgggagtaacctccctgcatgtttttctataaaggcatagtggttaagtccttccagctcattgaccattggagaattttatggaggctgtagactaggggctggtaaactaagggcccaggggccaaatccagcctgccacctacttttgtaaataaagttttcttggtgcacagccatgcccattcattcatttgcacaatgtctgtggctgctttcatgccaaaagcaggagaactgagtggttatgctggagacctacggccttcaaagccccagacctcacgtctggcccttgacagacagagcttccccagccctgctgcgcatcctggcccagcatgtgctgtgtgtgtgatttcagcttgcaggagccgtggttaggaattgtccctgtgttggtccattttgcattgctatgaaggagcacctgaggccgggtagattatgaaggaaagaggtctgtctggctcatggttctgtaggcagcaccagtatggcacccgcatctgctcagcttctagtgaggtctcaggaagctttgactcatggtggaagtcgaagcgggagcaggtgcatcacatggtgagagagggagcaacggagagagagagagagagagagagagcgcctctccctcttgccctcaccttgagaggagatgccaggctcctttaagtaaccagctcccatgtgaactcacagtgagagcccatttgctactgcggagagggcaccaggcatctgctcccatgacccaaacactgcccaccaggccctacctccaaccttggggtcatattttattctgttctatgctatgctatgctatgccatgccatgccatgccatgctattcctattctattatttgagacagaatctcgctctgttgcccaggctggagtgcagtggcatgatcttggctcactgcaacctccacctcccaggttcaagcgattctcctgcctcagcctcccgagtagctgggattacaggcacacaccaccacacccgggtaatttttgtattttcaatagagatggggtttcaccatgttggccaggctggtctcaaactcctggcctcaagtgatccacttacctcggcctcccaaagtgccatgattacagatgtgagtcactgcgcccagtgagggtcacatttccgttgagatttggaggggcagacgttggagccatctgagccccctcgtcccgctctagcttctcctcccgtgtgccccgcggtgctggtggcaggcccttacgccggttctggctgcacgctctgttccagaagctttcttccctgcttggttaccagaaaatcatcccatccattacaaggacagggtccccttatctcccattcccagggcaggacaccgggggcagggcaggtggggaactgagcaagttctctgggggcaggcgtggctatggctccctctgggtgggcgtctggggaggggtggaggcagccgtcagcgccctggcttgctcttcctccctggccagagactgtggccttgtgctgctcccgtgtgggctgcctgcacctccagtgggttgtgctccctcccctcccctcccctcaagctctgctgagcaccactgccttccacagcccccactctcgggaggcgaggctcctcgtggccattcctgtccttggcacccacccccccaccaacctggtagagccttgggcggggtctgttactccttgcatggcgtagacctccccacagtaggcacctgacacatacctcctggggggcaggcaggaggtgcgttgaggtctcagccctggcagtccctcccctgcgtggcataggcctcgccacagggtcatcgagggtgggtggagactgtactagaccactccccgctggtcctagaaagggtcccatctgtctgctctctgtttggagtccagaccttggttgctgtgccctgcatggtgggctggggggcaccctccagcctctctgagtgcatggcctctccttgcagccatctgcctgcccaaccagttccggtgtgcgagcggccagtgtgtcctcatcaaacagcagtgcgactccttccccgactgtatcgacggctccgacgagctcatgtgtggtgagccagcttctggcacggggaaggggcgtccgggctgggttcccccaggaacgtggagtttaggggaggagacgtgcctttccagcggggctgggggctgtgtgggagactcaggcggctgggaggctccttgcgggaggcagggaagcctttcccagggcagcggccaggaggacagactgtgagctgtgggctcggcggctacagagtctgcctcagtgggcggggctgatggtgtccaggtgcctgcagcacgcacccacccacgggaccttgctgagcagcgtctgtcaggcagcaagattacccgagggctgcagtggtcctgttccctggcagcttactgtctggctgaggaggagtgatgttcacatatgcacacatgtcatgtgcacacacatgtacatgacaacatcccacatgctcctcaaatagcatgacctgtacagtcacggatatagggcctaggggataggaggccaagacagtcagggaagactttccagaggcagtggctcctgaaaggctgtctgattcaggcaggaagggagctgagttcagataggaagtagcaatgagtcattgtgtctggggacatggccactccttcgctgcagagggacctgggctgagagctcctctcttatggctgcagtcgggagagaagtctgttggggggagaagggggcttcctcaagggactccctgtgccctttggcaccttcgtgccaggtcaggcttgaggcctgaaggcagtggtgggggccaccaagggtcgcctcctctgctgggcaagttcccagtctgacgggcctgtgccgtgggccccagctgtgggggcgctgttgatgcgcagccaggcctcgccgccagagcccgcacgcttccattccgctgacttcatcgacgccctcaggatcgctgggccggccctgtgggagagtgaatgtggcttttgccaaagttgagtctggagcctggaaacttccctatgggcagccttgatagtggagtggcccaaggagcccacccagccgaccctgcccctcccgtggctggtgggcggcaccaggggctgcctggctttgctcgttcaccaacatcacccgggctggccagggcgcgctcacttctgccaccaccgagggccctgggcgaaggagtgaataccaggctgccttggcagggatgtgttgagggctgtggggagtcggacagcggcgggggtcagaggaggaggagggtgcaccgtgcaggctgaagggccacgttaccctgaggttggccaggctccccaggcctagcctcccagctcccccactttctccccaccctccaccagtggcaaagccagccccttcagggcgcacggtgtctgcccccaaggagggcccattccgttggggttaatgttggccacctctttctgtttgtctctggcagaaatcaccaagccgccctcagacgacagcccggcccacagcagtgccatcgggcccgtcattggcatcatcctctctctcttcgtcatgggtggtgtctattttgtgtgccagcgcgtggtgtgccagcgctatgcgggggccaacgggcccttcccgcacgagtatgtcagcgggaccccgcacgtgcccctcaatttcatagccccgggcggttcccagcatggccccttcacaggtaaggagcctgagatatggaatgatctggaggaggcaggagagtagtctgggcagctttggggagtggagcagggatgtgctaccccaggccctcttgcacatgtggcagacattgctaatcgatcacagcattcagcctttcccactgagcctgtgcttggcatcagaatccttcaacacagaggcctgcatggctgtagcaacccaccctttggcactgtaggtgtggagaaagctccttggacttgaccttcatattctagtaggacatgtgctgtgttgtccacaaatcctcatgtaccctagaaatgaatgtgggggcggctgggctctctccagagctgaaggaatcactctgtaccatacagcagctttgtcttgagtgcagctgggatttgtggctgagcagttacaattcctacgtggcccaggcaccaggaacgcaggctgtgtttgtagatggctgggcagccgcaccgcagagctgcaccatgctggtttgtatcacatgggtgaccatggtatgtctaagaaggtggagtccctgtgaggtctgcaggtgcccccacagctccaggccaccttgaggattgcctctgcctgcccagccctgagttccctctcccctgtcctgtcccactgtcaccccaagccggcctcattgggagcctgttggatggcagggtatagatgtaacctgattctctctggggagcggggttatctggcttctcaagagctcctaggagcccacagtggtggcaccatcacagtcgcagcagcccccagagaacgcggccctgtctgttcctggcgtgctctgtgctgccccgcctgggttccctgccccagtcgcaggccccttggaggaggtaccatgtgtctcccgtttcacagatgagccccggggagctcactctagtagtggccagagaggcctgcggctcagggagcggggcacatttccaacaggacacaccgccctggtctgagtctcgtgggtagtgggagcagaggagagcgccctatgtctgtggggcggcttggctgagcctggaagccacctgacctcccccgtcccttccctgccaggcatcgcatgcggaaagtccatgatgagctccgtgagcctgatggggggccggggcggggtgcccctctacgaccggaaccacgtcacaggggcctcgtccagcagctcgtccagcacgaaggccacgctgtacccgccggtgaggggcggggccggggaggggcggggcgggatggggctgtgggcccctcccaccgtcagtgctggccaccggaggcttcccgggttcctgggggctgtgccaccgcctctgaggcatgcttgctttcttcccttttcaaacccttctgcttccttctttaatgacattgttgattgtggataatctgaaaactacacaaaaatataaagagccaaaatctcacccaaatccacctcctagagtggctgttgggctccgtcagcatccaggcggccgtctgtgttccgcacggcccagcccatcgatagccgcctgcaccaggcctgtctgccctctgtgagcctccccacagggttccctccacaaacaccctgttctcccacccagggctggctgcttcctggaaaacagctggatggttttgtgcatgacagacaaacacagggtgattttcgtggctaaaatactccctggagcttttggcagggtgaggggctggctccagctgagccacgccttgagtgaaatgactgtgaggagaataaactgccgctgccctccaggatcactggggctggctggggagaacccccgtttctgggagcacagtcccaggatgccaaggcgagcttggtgccgagatgtgaactcctgagtgtaaacagcgggggctgacttgacatgctttgtatgcttttcatttgttcctgcagctgtatgcccctaaggtgagtccagcccccttctgcttcctctggggcctcgccagtgagccccaccttgctggggctggttcctcctgcccttctgggtatccctcacatctggggtcttgtcttcttgttttatttttcttttttttttgagacggagtttcacttttgttgcccaggcttcagtgcaatggtgtgatctctaggctcaccgcaacctctgcctcccaggttcaagcagttctcctgcctcagcctccctagtagctgggattacaggcatgtgccaccacgcccagctaattttgtatttttagtagagatggggtttctccatgttggtcaggctgatcttgaactccctacctcaggtgatccgcccaccttggcctcccaaagtgctgggattacaggcgtgagccaccgcacctggcctttttcttttcttttcttttcttttttctgagacagggtctcgctctgtcacccaggctggagtgcaatggtgtcatcatggctaactgcagcctctaccttctaggctcaagcaatcctcccatctcagcccctaagtagctaggactgcacgcatgcatccccatgcccagctaatatttacattttttgtagagatgaagtttcactatattgcccaggctggtctccaactcctggactcgagcgatcctcctgcctcggcctccccaggtgctgggattacaggcgtgagccaccgtgcctggcctggggtattgtcttcttatggcacctgactgtggtgggccctgggaaggaagtagcagaagagggttcttcttggtttcctggacagtaactgagtgttctggaggccccagggcctggctttgtttagggacaaagggaactggtaaccagaagccgagagtttaaacacccactgcccttcttccctgctcctgctgctgcaacccagcttaaccagccaggagtgctaggaacccaagcagggcccccgagcacacagcaggcagctcacgaattctcttttcctgttctcccttgggagctgggaggatcttaatcaggcaataagagatggcactgagcagccagctaattttttaaatcactttattgtttaaccatatgactcacccacttaaaaaagggtacagttcagtgggttttagtgtattcacagatgtgtgcaaccctcaccacagttaattttagaacattttcctgcccctaaaagaaactctgcatgaagccagctgtttttaaattagcaaagttattttgcatcctttaaatatatgttcatggtacaaaattcaaaagatacagaagagtctgcagtccaaagagactccgcccccatgacgccaagcaggactccctgggaggcatggcctcctgcagtgtgtttcttctatgtccccccaggggtcatctgtacatatgcaagcatacaagagcgtggactttgttttccaagccagaagataattgtagatttatgtgcagttgtgagaaagagcacagacccatttatcctctgcctggtttcccccagtgctgcctgccatcttgcatgacttccattcctatcataagcaagacactgataacgattctttcaccttattcagattgacataagtgttttttgtttgttcttgagacaaacttcctctgtcacccagtgggagtgcagtggcacaatcacagctcactgcagcctcaaactcctgggctcaagcgattctcctgcctcagtcccctcaagtagctcagatggcaggtgtgcaccatcatgccaggctaatttttaaattttttgtggaggtgaggcctcactaaatttcctgggctagtcttgaactcctgagctaaagtgatcctcctgcctcagcctcccaaagtggtaggattacaggcatgagccactgcgcctgggctgacatatgtgttttcgtaagcccgaaagatagcatctgaagagtcaacattgagccttgccttttgctgctaatgatgtataaaagctgctgttctgagcatttcggaggctcccagctgccgtgtgcaccctgcctagagctctaccgtaacccatctccgggaggaggtgctattgttttcctcattttgcaacaaggaggctgaagaactgagcatgaaccactggcctgggtcgttcggttggtaggcagtggggccaggccatccaactcacaaccaccttctactctgcttcccccgcaccctgaagtttgttctgttttgaggacacagccgtcacattcttggtggctgaacagcactccttgtcaggtgtggctgggcccccactggagggcatcatggtcctctctcctgctgcggttgaaccttggctgtttcaaccactcctgccaagtggccctctgaaagggacagtccatcttttctcagcagagggccacactggcaaaacggtccctggcaccctttctctccacctgtctaatatagagtaaaaatggtatcatgttaagatcttcatttatatttattttatcatgaatgatgtaagcatcattttgtgtgtttaagaacctttgggcccagcgtgatggcttgcagctgtaatctcagcactttaggaggctgagatgagcggatcacttgaggccgggagtttgagaccagcctggccaacatggagaaaccccgtctctagtaaaaatttaaaaattagccgggtatggtgatcccagctacttgggagtctgaagcatgagaattgcttgaacatgggaggcggaggttgcagtgagccgagatcgcgccattgcactccagcctgggcgacagagcgagactctgtctcacaaaaaaaaaaaaaaaagaaaagaaaagaaattatcaatctcctcttttatggcatatatatatatatatatatatatatatatttatttccctttcttggttatgttcataaaggcctcccctgctctgatcataaaaaacaacttattttcacactctctctcttttttttttgagacagagttttgctcctgttgcccaggctggagtgcagtggcgcaatctcagctcactgtaacctccgcctcccgggttggagtgattctcctgccttaccttcccgagtagctgggattataggcatgcaccaccatgcctggctaattttgtacttttagtagagacgggggtttctccatgttggtcaggctggtctcgaactcgcgacctcaggtgatccacccacctcggcctcccaaagtgctgggattacagacgtgagccaccatgcccagcccacactctctttcttaacgtcctcctcctttcgttttacgttcacatctttaattcttctgggatgtaattagatttgatgagcaaggtgggcatccagcttgtttcttggctgatggcttatgggtggcgtgaattagtcggggtctatcaggaggcagaaactctatgagaatttgaacagagaaagttccgtctacaggcttattaccagggactggaatagcagaaattgaacagtgagatgtacagagaactctaagaatgcaggaataggccaggcatggtggctcacacctgtcatcccagcactttgggagaccaaggcgggtggatcacctgaggtcaggagttcgagaccagcctggccaacatagtgaaaccccatctctactaaaaatacaaaaaaattagctgggtgtggtggcgcatgcctgtaatcccagcttctcgggagtctgaggctggagaatcacttgaacctgggaggcagaggttgtagtgagccgagatcatgccattgtactccagcctgggcaacaagagcgagactcagtcaaaacaacaacaacgcaggaatagcagatgagccgaggtggggcctccccagcccccaccccccaccccgcaccctgggccgagatccagtcctctttgaatagggcctgggcgtggttcacgggacatctgagacattgccgaggcgctgcactggtggatcttgccagaagtctgcccagtgcagatttgggcagaatctcaaactgccttgggatgtaggagagaaaccaggcctggtcaagttcatgggaagaggtggaaacagaccccataggctggggcttgggcagctgtaggaagccctctctgctgcctccctgcctgctctctgctttgaagcatcttccccagtgcccccagtctcatgccctctcaacgttggggtcaaatcctgaggaatacccagactggctctctgggccaaagaggaccctctccagaaagagcagggcccagtgcggcttcctaaagggcaggggaagggcctggccactccccagaggctactcaccagccatcaggatagccccaggaagcaggccttctcgagcccattttattactttattttattattttatttaattttaaatttattttttgagacagagtctcactctgttgcccaggctggagtgcagtggtgcgatctcaacccactgcagcctctgcctccagggttcaagggattctcccacctcagcctcccaagtagctgggattacaggtgcccgccaccacacccggctaattttcatatttttagtagagacgaggtttcaccatgttggccaggctggtctcgaactcctgacctcaagtgatccgcccgcctcggcctcccaaagtgctaggtcaagcccattttaaagttgaagaaactgaggctgaggtaaattccctccccagggatcctgctgcagccagaaggtggtaaaacaggacttcacccgggtctgtctggcgtgaaaggcagtgttcttgtaccaccctagggggcctgagagaactgagtccctcgggcataactgacagttctgttcccattattccgcaggggctcggatctggctgtatgctttccaggatggccttggagacccacataagccctacaccctttgggaagctgcatgttgggttggggtgccgtcagtggcacttgtggaaggtgcagacctgtgtgggtgtgtgggcccagggcccctggtcccttcctccctttgtagggctggttgtgtgctgcctggacctggggggcacgttcacgtggtgaatttgtctatttactatccccgctttggggctggtgccagcacaggcccttgtgaagggggtgcctttgtctggagtgggactgtggcccctccctcagcgtggtgacttctgtgtcagggcttcagcagggacgcagagcccctgagtgttcggaacaagggcgtcattgcaggagttagactgtgtgtgatggagggaggaggggcaggaggaaaggtcagaaggagagttcctgggaaggtccctgaggagcctggtgaggtgctaactggtgtggaggacactcagggcctgtggggacatctcctactgctgggggccagccacaaagggaactggccgaagtcctgtccccgccttcacagcccagcatctggtcacaaggcaggtacttggaagggcgcgggcacctgggccaaaagtgcctgggttccctttgcctttcactgagatgaccttcggggcaggtggctgctgcctcccctcctgtccccaggttttgccaactggccagaggaaggggtcctgggaagcaggggggccagaagccctctctgcaaggaaagcccgaggggtgtgggaggaaggaaggaatgcccaggctggcgaggctctaagtcaccctggcttggctctcctcagatcctgaacccgccgccctccccggccacggacccctccctgtacaacatggacatgttctactcttcaaacattccggccactgcgagaccgtacaggtaggacatcccctgcagccctccatggccattgggttcccgccagcccgtggtggaggggcctaatccccatgccactgatgaggggaggtattctgggtgctagtgggcaggtgccgggcccagccctgcctccctctgctctgccaaccacactaggctgcctccccagacaagctcagcgggcactgcatgttgggttcagaaatcagcagaactccacgttctgagctgctcttcaagttgctcctatgggggttacttttaagctgggaaatggctgtggcgtcgaggggccgggggcttgggctccaaactctgactgtgtgtttgagtccggctgtggaaacctagccattgagatgccccctcttggtggctctgtcctcttaggatgggacaagtctgtgaaggctgctgcagcacccaccgtagacccctaatcgtgtgacgtcaccaggatggtccgggctgctcacttgccacagtggcctgtttgagcccgggaagccaacggggctgctcagctggacaccagccccccgagctgcccatgttggggtcacaggccccacctccctggttggggaggggcaactgagagtgtggagaggtgggacccaggtgtgctggtctccgcaggggctggatcagagcctgggatgggcagggtgagcctcctgacctttaacccagtggtgtcaggcaacgtggcccacccgccagccgcaccaggccccacccccgcaggtgaaggggtgggataggctgggcctgggccaggacacctctggaccacgcattcctcattgcttgggtccctggagcagcagggcctcccgagtgtggtgccgcctgccacctagtggccatttccacgaactcccaggcctggctggggagccggaactgcagcctccatttccaccccactccgggtcgggccacctccctgatgcctcagtattatatcaaactgtcacagtctgtcccacagccttacagaccactgtctccagaatggtcacatccacactgggcagcccagtctcgctagttcctcgtcccacctcctgcctttgctcatgcccgtcctgctctgggcccaccgcggacacatcttccccccgcccgccgtctgacctcacagcagctgggccccaagaggagtatcctgtcctgctgcacttttctcaacacccggtgttggctgcaccttcccacccattgcaggcccctctgtgacaggacgggggctcctaaacacaccacagttccgagtctgaactcacacagtgggatgcggcgtttctgggccacagttgggtgcaggtagcctctgggaggatgggaggtcaggagccatcttgcgagtcaggttgcttgaactcaggatggaagtgttccgggcccattggttgctgtattagcctgttctcacgctgctaataaagacatacccaagactgggtaattgtaaaggaaagaggtttaacggactcacagttccacctgcctggggtggcctcacaatcatggtagaagacaaggaggagcaagtcacatcttacatggcttcagggaacagacagcatgagaaccaagcgaaaggggtttccccttgtaaaaccatcaagtctagtgagatttattcactaccacgagaacagtatggggggaaccacccccatgattcaatcatctcccactgggtccctcccacagcacgtgggaattatgggagtacaattcaagatgagatttgggtggggacacagccaaaccctatcggttgccaacatttacagtaacagtgttaggtgaacagttgtccagtctcctgttttgtcggacactgtttctagcaccttccaggcagaatctcatgtatccttcactttcgaaatgggtactatttcatccccacttttatcaatgagaaactaaagctcgaagaggtcaagtaagttcctggccaaggtcagctagcaggctctagaggcctcgttctccttagaggcagccttgccagggcccaggcttggcaggctgcagggcaggtgcgggcatgcccatggtagaggtgggaccattgaggctcagagagggtaagtgatgagccctggcgacacagcggggtgggtccagagtccggcctgcatcttctggagctggccagtggacaggcctttcccgttcacagccccggggctgctgtgcccaccagggcggatgtgcctaccgaatcccactcctctgtgtgtgtccctttcaggccctacatcattcgaggaatggcgcccccgacgacgccctgcagcaccgacgtgtgtgacagcgactacagcgccagccgctggaaggccagcaagtactacctggatttgaactcggactcagacccctatccacccccacccacgccccacagccagtacctgtcggcggaggacagctgcccgccctcgcccgccaccgagaggagctacttccatctcttcccgccccctccgtccccctgcacggactcatcctgacctcggccgggccactctggcttctctgtgcccctgtaaatagttttaaatatgaacaaagaaaaaaatatattttatgatttaaaaaataaatataattgggattttaaaaacatgagaaatgtgaactgtgatggggtgggcagggctgggagaactttgtacagtggagaaatatttataaacttaattttgtaaaacagaactgccattcttttgtgccctgtgtgcatttgagttgtgtgtccccgtggagggaatgccgacccccggaccaccatgagagtcctcctgcacccgggcgtccctctgtccggctcctgcagggaagggctggggccttgggcagaggtggatatctcccctgggatgcatccctgagctgcaggccgggccggctttatgtgcgtgtggcctgtgccgtcagaaagggccctgggcttcatcacgctgttgctgttcgtcttcctcagattcttagtcttttttttttttttttttttttgagacggagtctttctctgtcatccaggctggagtgcagtggtacaatctcagctcactgcaagctccgactcccaggttcaagtgagtctcctgcctcagcctcccgagtagctgggactacaggtgcgcgccaccacacccgcccagctaatttttgtatttttagtagagatggggtttcaccatgttggccaggatgatctcgatctcttgacctcgtgatccgcccacctcggcctcccaaagtgctgggattataggcatgagccactgtacccagctgactcttagtcacttttaagaaggggactgtgccttcatttttcactgggccctgcagaatatatgcctgggctctgggctcttctgaacctgtgttggcttccatctgacctctctgtgccagcccaaggctgctgctcttcctgagggcaaggagccccatgactgcgtgttgactcgctggatggggctgctgagcccactctgccacaccacgtgcccctggcagggagggaatccctgggtcctcacaggaacagtcagcaagccacacctgacgcctgctgtgggcccatccctgcggtgctggagaagacagacaaggcctggtcactgcctctgcagggtccccagtccgtggaaggagacagtaatctaggcattttcggtggggaagctgagctgttctcgtgtcctgaaggccaggcgggaacagccgtcttcagagggaagggagaaaatgcacatcgcatcagtggagaagggcctgacttccctcagcatggtggagggaggtcagaaaacagtcaagcttgagtattctatagtgtcacctaaata

SEQ ID NO: 10 - DNA, 8705 bp, Homo sapiens
ggactcaggggcagcagggaggtacacccatggttagtgggcggaccatagggggtaatgagagggtgaatcgatggaacctgggggacacaatcgaagtggttccagagtcgggctgtactaattaaagagacggggcagtggacaggcattttcagttgactgcccagggagtgttctgcccaacagggaggatatgcgtacagaatcatactcgatcagcatgagtccaattcagaccgtacatcagtggagatatgggtcccccgatgactccgtggaacactgatgtttgtgacaggggagtacagcaccagccatcagcaggccagtaaatcataccggcctgcgaaattggactcagacccggatccaccctgaccgacgtcccaagcccccaccccccaccccccaccatgggccgagatccagtcctctttgaatagggcctggccgtggttcacgggacatctgagacattgccgaggcgctgcattggtggatcttgccagaagtttgcccagtgcagatttgggcagaatctcaaactgccttgggatgtaggagagaaaccaggcctggtcaagttcatgggaagaggtggaaacagaccccataggctggggcttgggcagctgtaggaagccctctctgctgcctccctgcctgctctctgctttgaagcatcttccccagtgcccccagtctcatgccctctcaacgttggggtcaaatcctgaggaatacccagactggctctctgggccaaagaggaccctctccagaaagagcagggcccagtgcggcttcctaaagggcaggggaagggcctggccactccccagaggctactcaccagccatcaggatagccccaggaagcaggccttctcgagcccattttattactttattttattattttatttaattttaaatttattttttgagacagagtctcactctgttgcccaggctggagtgcagtggtgcgatctcaacccactgcagcctctgcctccagggttcaagggattctcccacctcagcctcccaagtagctgggattacaggtgcccgccaccacacccggctaattttcatatttttagtagagatgaggtttcaccatgttggccaggctggtctcgaactcctgacctcaagtgatccgcccgcctcggcctcccaaagtgctaggtcaagcccattttaaagttgaagaaactgaggctgaggtaaattccctccccagggatcctgctgcagccagaaggtggtaaaacaggacttcacccgggtctgtctggcgtgaaaggcagtgttcttgtaccaccctagggggcctgagagaactgagtccctcgggcataactgacagttctgttcccattattccgcaggggctcggatctggctgtatgctttccaggatggccttggagacccacataagccctacaccctttgggaagctgcatgttgggttggggtgccgtcagtggcacttgtggaaggtgcagacctgtgtgggtgtgtgggcccagggcccctggtcccttcctccctttgtagggctggttgtgtgctgcctggacctggggggcacgttcacgtggtgaatttgtctatttactatccccgctttggggctggtgccagcacaggcccttgtgaagggggtgcctttgtctggagtgggactgtggcccctccctcagcgtggtgacttctgtgtcagggcttcagcagggacgcagagcccctgagtgttcggaacaagggcgtcattgcaggagttagactgtgtgtgatggagggaggaggggcaggaggaaaggtcagaaggagagttcctgggaaggtccctgaggagcctggtgaggtgctaactggtgtggaggacactcagggcctgtggggacatctcctactgctgggggccagccacaaagggaactggccgaagtcctgtccccgccttcacagcccagcatctggtcacaaggcaggtacttggaagggcgcgggcacctgggccaaaagtgcctgggttccctttgcctttcactgagatgaccttcggggcaggtggctgctgcctcccctcctgtccccaggttttgccaactggccagaggaaggggtcctgggaagcaggggggccagaagccctctctgcaaggaaagcccgaggggtgtgggaggaaggaaggaatgcccaggctggcgaggctctaagtcaccctggcttggctctcctcagatcctgaacccgccgccctccccggccacggacccctccctgtacaacatggacatgttctactcttcaaacattccggccactgcgagaccgtacaggtaggacatcccctgcagccctccatggccattgggttcccgccagcccgtggtggaggggcctaatccccatgccactgatgaggggaggtattctgggtgctaatgggcaggtgccgggcccagccctgcctccctctgctctgccaaccacactaggctgcctccccagacaagctcagcgggcactgcatgttgggttcagaaatcagcagaactccacgttctgagctgctcttcaagttgctcctatgggggttacttttaagctgggaaatggctgtggcgtcgaggggccgggggcttgggctccagagtctgactgtgtgtttgagtccggctgtggaaacctagccattgagatgccccctcttggtggctctgtcctcttaggatgggacaagtctgtgaaggctgctgcagcacccaccgtagacccctaatcgtgtgacgtcaccaggatggtccgggctgctcacttgccacagtggcctgtttgagcccgggaagccaacggggctgctcagctggacaccagccccccgagctgcccatgttggggtcacaggccccacctccctggttggggaggggcaactgagagtgtggagaggtgggacccaggtgtgctggtctccgcaggggctggatcagagcctgggatgggcagggtgagcctcctgacctttaacccagtggtgtcaggcaacgtggcccacccgccagccgcaccaggccccacccccgcaggtgaaggggtgggataggctgggcctgggccaggacacctctggaccacgcattcctcattgcttgggtccctggagcagcagggcctcccgagtgtggtgccgcctgccacctagtggccatttccacgaactcccaggcctggctggggagccggaactgcagcctccatttccaccccactccgggtcgggccacctccctgatgcctcagtattatatcaaactgtcacagtctgtcccacagccttacagaccactgtctccagaatggtcacatccacactgggcagcccagtctcgctagttcctcgtcccacctcctgcctttgctcatgcccgtcctgctctgggcccaccgcggacacatcttccccccgcccgccgtctgacctcacagcagctgggccccaagaggagtatcctgtcctgctgcacttttctcaacacccggtgttggctgcaccttcccacccattgcaggcccctctgtgacaggacgggggctcctaaacacaccacagttccgagtctgaactcacacagtgggatgcggcgtttctgggccacagttgggtgcaggtagcctctgggaggatgggaggtcaggagccatcttgcgagtcaggttgcttgaactcaggatggaagtgttccgggcccattggttgctgtattagcctgttctcacgctgctaataaagacatacccaagactgggtaattgtaaaggaaagaggtttaacggactcacagttccacctgcctggggtggcctcacaatcatggtagaagacaaggaggagcaagtcacatcttacatggcttcagggaacagacagcatgagaaccaagcgaaaggggtttccccttgtaaaaccatcaagtctagtgagatttattcactaccacgagaacagtatggggggaaccacccccatgattcaatcatctcccactgggtccctcccacagcacgtgggaattatgggagtacaattcaagatgagatttgggtggggacacagccaaaccctatcggttgccaacatttacagtaacagtgttaggtgaacagttgtccagtctcctgttttgtcggacactgtttctagcaccttccaggcagaatctcatgtatccttcactttcgaaatgggtactatttcatccccacttttatcaatgagaaactaaagctcgaagaggtcaagtaagttcctggccaaggtcagctagcaggctctagaggcctcgttctccttagaggcagccttgccagggcccaggcttggcaggctgcagggcaggtgcgggcatgcccatggtagaggtgggaccattgaggctcagagagggtaagtgatgagccctggcgacacagcggggtgggtccagagtccggcctgcatcttctggagctggccagtggacaggcctttcccgttcacagccccggggctgctgtgcccaccagggcggatgtgcctaccgaatcccactcctctgtgtgtgtccctttcaggccctacatcattcgaggaatggcgcccccgacgacgccctgcagcaccgacgtgtgtgacagcgactacagcgccagccgctggaaggccagcaagtactacctggatttgaactcggactcagacccctatccacccccacccacgccccacagccagtacctgtcggcggaggacagctgcccgccctcgcccgccaccgagaggagctacttccatctcttcccgccccctccgtccccctgcacggactcatcctgacctcggccgggccactctggcttctctgtgcccctgtaaatagttttaaatatgaacaaagaaaaaaatatattttatgatttaaaaaataaatataattgggattttaaaaacatgagaaatgtgaactgtgatggggtgggcagggctgggagaactttgtacagtggagaaatatttataaacttaattttgtaaaacagaactgccattctttcgtgccctgtgtgcatttgagttgtgtgtccccgtggagggaatgccgacccccggaccaccatgagagtcctcctgcacccgggcgtccctctgtccggctcctgcagggaagggctggggccttgggcagaggtggatatctcccctgggatgcatccctgagctgcaggccgggccggctttatgtgcgtgtggcctgtgccgtcagaaagggccctgggcttcatcacgctgttgctgttcgtcttcctcagattcttagtctttttttttttttttttttttttgagacggagtctttctctgtcatccaggctggagtgcagtggtacaatctcagctcactgcaagctccgactcccaggttcaagtgagtctcctgcctcagcctcccgagtagctgggactacaggtgcgcgccaccacacccgcccagctaatttttgtatttttagtagagatggggtttcaccatgttggccaggatgatctcgatctcttgacctcgtgatccgcccacctcggcctcccaaagtgctgggattataggcatgagccactgtacccagctgactcttagtcacttttaagaaggggactgtgccttcatttttcactgggccctgcagaatatatgcctgggctctgggctcttctgaacctgtgttggcttccatctgacctctctgtgccagcccaaggctgctgctcttcctgagggcaaggagccccatgactgcgtgttgactcgctggatggggctgctgagcccactctgccacaccacgtgcccctggcagggagggaatccctgggtcctcacaggaacagtcagcaagccacacctgacgcctgctgtgggcccatccctgcggtgctggagaagacagacaaggcctggtcactgcctctgcagggtccccagtccgtggaaggagacagtaatctaggcattttcggtggggaagctgagctgttctcgtgtcctgaaggccaggcgggaacagccgtcttcagagggaagggagaaaatgcacatcgcatcagtggagaagggcctgacttccctcagcatggtggagggaggtcagaaaacagtcaagcttgttgctgggtgacagtgcatttaataatcaaaatataggctgggtacggtggctcatgcctgtaatcccagcactttgggaggctgaggcaggtggatcacttgaggccaggagtttgagaccggcctggccaacatggcaaaacctcaactactaaaatacaaaaactagccgggcgtggtggtgcacgcctgtaatcccagctacttgggaggctgaggcaggagaattgcttgaacctgggaggcggaggctgcagtgagccgagattgtgccactgcactccagcctgggcaacagagcaagactctgtctcaaaaaaaaaaaaaaaaaaagcaatacaaaatacaaatatcactttcactaaaagaagggatggaagacccaaaacaaacagaaaacaacaaaatggcaggagtaagtccccacttatcaataataacattgactgtaaataggctaagctctgcaatcaaaagagtgggccaggagcggtggctcacgcctgtaattccaacgctttgggaggctgaggcggatggatcatttgatgtcacgagttttaagaccagcctggccaacaaggtgaaaccccatctgtactaaaaatacaaaaattagccaggcggtagtggcacgcacctgtaatcccagctacttgtgaggctgaggcaggagaatcactggaggctgggaagcggaggttgctgtgagccaagatggagccactgcactcccacctgggcgacagagtgagatcctgtcttaagaaaaaaaagagtggatgaatggatcaaaaaacaagacccaaccatctcttgcatacaagaaacacactttacctataaaaacacactaggccaggtgtggtggctcacacctgtaatcccagccctttgggaggcctgactggcagatcacctgaggccaggagtttcagaccagcttgaccgacatggcaaaaccccatctctcctaaaaatacaaaaaaacaaaaaaaagaaaaaggctggaagtagtgatgtgtgcctgtagccccagctacttgggaggctgaggcaggagaattgcttgaatccgggaagtggaggttgcagtgagccaggatggtgccactgcactccagcctgggtgacagagcgagaccctgtcataaaaaaaaaaagaaaagaaaagaaaaacgagaaaaacaaacacaaaattagtagaagaaaagaaataataaagatcagaacaggccaggctcatgggcacagtggctcaactcctacctgctcaggagtttgagaccagtctggccaacatggcaaaaccccatctctcctaaaaatatgaaaaaaaaaaaataggctggatgtggtgatgtgtgtgtgcctgtagccccagctacttgggaggctgaggtgggagaatcacttgagcccaggaagtggaggctgcagcgagtcatgaatgcaccctgcactctagctgggtaactggagtgagattctgtctcaaaaaagcaaagaccagagcagaaataaatgaaatggaaatgaaggaaacaatgcaaaatgatacaaaaagttttttcgaaaagataaacaaaatcaacaaacctttagccagattaagaaaaaaagagagaagacccaaataaataaaatccgagattaaaaaggagacattaccactgataccacagaaattcaaaggatcattagaggcaactatgtgcaactatatgctaatgaactggaaaacctagaagaactgggtaaatttctagacacatacaacctatcaagattgaaccatgaagaaatccaaaacctgaacaggccgggcacggtggcttacgcctgtaatcccagcactttggaaggcctgagatcaggagttcgagaccagcctggccaacatggtgaaaccccatctctactgaaaaaatataaaaattagccgggcgtggtggcgggtgcctctaatgtcagccactcgggaggctgaggcaggaaaatcacttgaacctgggaggcataggttgcagcgagccgaggttgcaccactgcactccagccttggcgacagagccagactccatctcaaaaaaattaaaataacaaaaacctgaacagaccaataacaagtaatgcgatgaaaactgtaataaaatgtttcccaacaaagaaagcccaggaacaaatggcttcactgctgaattttaccaaacatttttttttttttgagacggagtctcgctctgtcgcccaggctggagtgcagtggtgtaacctcggttcgctggtaacttatgcctctcaggctgcaagtgattttcctgcttcaggccccccgagtggctggaaattagatggtacttgtcaaacaaggcctggctaaatttctatatttccttcaagtagaagatgtgcttccaacaaaggttgggttacggctggcttctgaaaatcttggatttcaaggctccccaaaag

SEQ ID NO: 11 - DNA, 66933 bp, Homo sapiens
tataatcaagcgcgttccgtccagtccggtgggaagattttcgatatgcttcgtgatctgctcaagaacgttgatcttaaagggttcgagcctgatgtacgtattttgcttaccaaatacagcaatagtaatggctctcagtccccgtggatggaggagcaaattcgggatgcctggggaagcatggttctaaaaaatgttgtacgtgaaacggatgaagttggtaaaggtcagatccggatgagaactgtttttgaacaggccattgatcaacgctcttcaactggtgcctggagaaatgctctttctatttgggaacctgtctgcaatgaaattttcgatcgtctgattaaaccacgctgggagattagataatgaagcgtgcgcctgttattccaaaacatacgctcaatactcaaccggttgaagatacttcgttatcgacaccagctgccccgatggtggattcgttaattgcgcgcgtaggagtaatggctcgcggtaatgccattactttgcctgtatgtggtcgggatgtgaagtttactcttgaagtgctccggggtgatagtgttgagaagacctctcgggtatggtcaggtaatgaacgtgaccaggagctgcttactgaggacgcactggatgatctcatcccttcttttctactgactggtcaacagacaccggcgttcggtcgaagagtatctggtgtcatagaaattgccgatgggagtcgccgtcgtaaagctgctgcacttaccgaaagtgattatcgtgttctggttggcgagctggatgatgagcagatggctgcattatccagattgggtaacgattatcgcccaacaagtgcttatgaacgtggtcagcgttatgcaagccgattgcagaatgaatttgctggaaatatttctgcgctggctgatgcggaaaatatttcacgtaagattattacccgctgtatcaacaccgccaaattgcctaaatcagttgttgctcttttttctcaccccggtgaactatctgcccggtcaggtgatgcacttcaaaaagcctttacagataaagaggaattacttaagcagcaggcatctaaccttcatgagcagaaaaaagctggggtgatatttgaagctgaagaagttatcactcttttaacttctgtgcttaaaacgtcatctgcatcaagaactagtttaagctcacgacatcagtttgctcctggagcgacagtattgtataagggcgataaaatggtgcttaacctggacaggtctcgtgttccaactgagtgtatagagaaaattgaggccattcttaaggaacttgaaaagccagcaccctgatgcgaccacgttttagtctacgtttatctgtctttacttaatgtcctttgttacaggccagaaagcataactggcctgaatattctctctgggcccactgttccacttgtatcgtcggtctgataatcagactgggaccacggtcccactcgtatcgtcggtctgattattagtctgggaccacggtcccactcgtatcgtcggtctgattattagtctgggaccacggtcccactcgtatcgtcggtctgataatcagactgggaccacggtcccactcgtatcgtcggtctgattattagtctgggaccatggtcccactcgtatcgtcggtctgattattagtctgggaccacggtcccactcgtatcgtcggtctgattattagtctggaaccacggtcccactcgtatcgtcggtctgattattagtctgggaccacggtcccactcgtatcgtcggtctgattattagtctgggaccacgatcccactcgtgttgtcggtctgattatcggtctgggaccacggtcccacttgtattgtcgatcagactatcagcgtgagactacgattccatcaatgcctgtcaagggcaagtattgacatgtcgtcgtaacctgtagaacggagtaacctcggtgtgcggttgtatgcctgctgtggattgctgctgtgtcctgcttatccacaacattttgcgcacggttatgtggacaaaatacctggttacccaggccgtgccggcacgttaaccgggctgcatccgatgcaagtgtgtcgctgtcgacgagctcgcgagctcggacatgaggttgccccgtattcagtgtcgctgatttgtattgtctgaagttgtttttacgttaagttgatgcagatcaattaatacgatacctgcgtcataattgattatttgacgtggtttgatggcctccacgcacgttgtgatatgtagatgataatcattatcactttacgggtcctttccggtgatccgacaggttacggggcggcgacctcgcgggttttcgctatttatgaaaattttccggtttaaggcgtttccgttcttcttcgtcataacttaatgtttttatttaaaataccctctgaaaagaaaggaaacgacaggtgctgaaagcgagctttttggcctctgtcgtttcctttctctgtttttgtccgtggaatgaacaatggaagtccgagctcatcgctaataacttcgtatagcatacattatacgaagttatattcgatgcggccgcaaggggttcgcgtcagcgggtgttggcgggtgtcggggctggcttaactatgcggcatcagagcagattgtactgagagtgcaccatatgcggtgtgaaataccgcacagatgcgtaaggagaaaataccgcatcaggcgccattcgccattcaggctgcgcaactgttgggaagggcgatcggtgcgggcctcttcgctattacgccagctggcgaaagggggatgtgctgcaaggcgattaagttgggtaacgccagggttttcccagtcacgacgttgtaaaacgacggccagtgaattgtaatacgactcactatagggcgaattcgagctcggtacccggggatcctctagagtcgacctgcaggcatgcaagcttctcttgtgccggttgtacgctgtcaggtcacactggtgagttaggcagggcacagatgcccagagcagagggaactttccttggggattcaacacgtgcaagtcttaggggctggcaaatcctgccctcagctagagagggggcttttatttgagaccagaatcacctgagcatcctcctgtccccagctgtgtccagcctgtctgcagggacatcctgagaggaccaggctctcccctcatccacctgcctaagtgccactctgaaccctgtccacctgtgccgtggaggggcgtgacctcaagctgctcagccagcagcaggcttggccctggggggcagcagagacccaggtggctgtggggtgggtgcttcgtggcgtggttctgaaacttcgttggaagtgtgtggacagtgccttgcctgttctctgtgggaccctatttagaaacgaggtctgagttactgggggtcatcactgtgttctgatggcccagctgtgtggaggccgcggtgcagccccatccaaggagccagggccctgggtctagccgtgaccagaatgcatgccccggaggtgtttctcatctcgcacctgtgttgcctggtgtgtcaagtggtcgtgaaactctgtgttagctcttggtgttcctgaaagtgcccccgggtctcaggcctcagaaccagggtttcccttcatctcggtggcctgggagcatctgggcagttgagcaaagagggcgattcacttgaaggatgtgtctggccctgcctaggagccccccggcacggtgctggggcctgaagctgccctcgggtggtggagaggagggagcgatgaagtggcgtcgagctgggcaggaagggtgagcccctgcaaggtgggcatgctggggacgctgagcagcatggccagcagctgggtctgcagcctggtacccggcgggacttgtggttggggctggtttgtggccaggagaggggctggcaggagacaagggggactgtgaggcagctcccacccagcagctgaagcccaatggcctggctgtgtggctctcagctgcgtgcataacctctcagtgcttcagttctctcatttgtaaaatgaggaaacaaacagtgccagcctcccagaggtgtcatgaggatgaacgagtgaccatgtagcatgggctgggtgcgtgtcacctaacatcaccagcctttgcaaggagagccctgggggcctggctgagtatttcccttgcccggcccaccccaggcctagacttgtgcctgctgcaggcccttgacccctgaccccattgcacctgtctccacaggagccgaggaggtgctgctgctggcccggcggacggacctacggaggatctcgctggacacgccggacttcaccgacatcgtgctgcaggtggacgacatccggcacgccattgccatcgactacgacccgctagagggctatgtctactggacagatgacgaggtgcgggccatccgcagggcgtacctggacgggtctggggcgcagacgctggtcaacaccgagatcaacgaccccgatggcatcgcggtcgactgggtggcccgaaacctctactggaccgacacgggcacggaccgcatcgaggtgacgcgcctcaacggcacctcccgcaagatcctggtgtcggaggacctggacgagccccgagccatcgcactgcaccccgtgatggggtaagacgggcgggggctggggcctggagccagggccaggccaagcacaggcgagagggagattgacctggacctgtcattctgggacactgtcttgcatcagaacccggaggagggcttgttaaaacaccggcagctgggccccacccccagagcggtgattcaggagctccagggcggggctgaagacttgggtttctaacaagcaccccagtggtccggtgctgctgctgggtccatgcgtagaaagccctggagacctggagggagccctttgttcccctggcttcagtttcctcatctgtagaatggaacggtccatctgggtgatttccaggatgacagtagtgacagtaagggcagcctctgtgacactgaccacagtacaggccaggcctctttttttctttttttttttttgagatggagtctcactctgtcgcccaggctggagtgcagtggtgtgatctcagctcactacaacctctgcctcctgggctcaagtgattctcctgcctcagcctcctgagtagctgggattacaggtgcctgccactgtgcttggctaatgtttgtatttttggtagagatggggtttcaccgtcttggccaggctggtcgcaaactcctgacctcaggtgatccacctgcctcagcctcccaaagtgctgggattacaggcatgagccaccacgcccggtcaggccaggcctcttttgaacactttgcacaccatgggtcttttcatccaggggggtaggtacagttgtacagttgaggacactgaagcccagagaggctcagggacttgcccagggtcacacagcaggatgtggcaggtgtggggctgggcctggcagcgtggctccagctttccagcatagaaatctgtgaaagcagatagtttgtcggtcggtaggggagactttctgagacccgccccagcggctcagagggtagtagccaggggccttcctgggggctcataacccagaacactgaatgggaaaaccctgatggaggaggcgcagtggagctgtgggtgccgatgggaagtcccagaggagctgggaggtcagtagcggtgctgccctctgtggagcacttagtgggcaccaggtgtgtttccaggttcatggccctgggacctgaagctcagaaggtgaagtaacttgcccagggcacccgtcgggcagcggcgggcagaggatttgtgggctgtggagcctgtgctcgtggcccagccctgggggttgtgagtgtgctggccggggagcttttcctgcaagtggactggtgtctaggagccagcatgtcaggcagcaggcagcgggagtgcagcaggcagcgggagcacagcaggcagagggcggggctcgagcagccatccgtggaccctggggcacggaggcatgtgggagagggctgctccatggcagtggctgaagggctgggttgtgccccgaggagggtggatgagggtaagaagtggggtccccaggggctttagcaagaggaggcccaggaactggttgccagctacagtgaagggaacacggccctgaggtcaggagcttggtcaagtcactgtctacatgggcctcggtgtcctcatctgtgaaaaaggaagggatggggaagctgactccaaggcccctcctagccctggtttcatgagtctgaggatcccagggacatgggcttggcagtctgacctgtgaggtcgtggggtccagggaggggcaccgagctggaagcgggaggcagaggggctggccggctgggtcagacacagctgaagcagaggctgtgacttggggcctcagaaccttcacccctgagctgccaccccaggatctgggttccctccttggggggccccagggaacaagtcacctgtcctttgcataggggagcccttcagctatgtgcagaaggttctgctctgccccttcctccctctaggtgctcagctcctccagcccactagtcagatgtgaggctgccccagaccctgggcagggtcatttctgtccactgacctttgggatgggagatgagctcttggcccctgagagtccaagggctggtgtggtgaaacccgcacagggtggaagtgggcatccctgtcccaggggagcccccagggactctggtcactgggcttgccgctggcatgctcagtcctccagcacttactgacaccagcatctactgacaccaacatttacaaacaccgacattgaccgacaccgacatttaccgacactgacatttaccaacactgtttaccaacactgacatctactgacactggcatctaccaacactgacatttaccgacactgacatttaccaacactatttaccaacactgacatctactgacattggcatctaccaacaccaacatttaccgacaccaacatttaccaacactgaaatttaccgacaccgacatttaccgacaccgtttaccaacaccgacgtttaccgacaccgacatttaccgacactgatatttaccaacactgacatctactgacgctggcatctactgacaccgatgccagcatctaccaacaccgacatttaccaacactgacatttactgacactgatatctactgacactggcatctactgacaccaacatttaccaacaccagcatctaccaacaccgacatttaccaacaccagcatttaccaacaccgatgtttaccaacgccgacgtttaccgacgccagcatctaccaacactgacatttaccgacaccgacatttaccgacactgacatttactgacactgacatctactgatactggcatctaccgacactgatatttaccaacgccagcatctactgacactgatgtttaccaacaccgacatttacgagcaccgacatttactgacaccaatatttactgacatcaacatttagccatgtgatgggggccggcttgggggcaggccttgctcttggcactggggatgctgcagagaccagacagactcatggggtcatggacttctgcttcttctccagcctcatgtactggacagactggggagagaaccctaaaatcgagtgtgccaacttggatgggcaggagcggcgtgtgctggtcaatgcctccctcgggtggcccaacggcctggccctggacctgcaggaggggaagctctactggggagacgccaagacagacaagatcgaggtgaggctcctgtggacatgtttgatccaggaggccaggcccagccaccccctgcagccagatgtacgtattggcgaggcaccgatgggtgcctgtgctctgctatttggccacatggaatgcttgagaaaatagttacaatactttctgacaaaaacgccttgagagggtagcgctatacaacgtcctgtggttacgtaagatgttatcattcggccaggtgcctgtagacacagctacttggagactgaggtgggaggatcgctggagtccaagagtttgaggccagcccgggcaaaggggacacaggaatcctctgcactgcttttgccacttactgtgagatttaaattatttcacaatacaaaattaagacaaaaagttaatcacatatccactgccctgcttaagacagaaaacatgggtgttgttgaagccagaggcagctgctggcctgagtttggtgattggttcctaagcagttgaaggcagttttgtttttccatagatgtctgttctccctttgctgggtgcagcctcgccctgctgctgtggtcgggtttcagtggcctcgtcccgtggacgcagcctcgccctgccgctgtggtcgggtttcagtggcctcgtcccgtggacgcagcctcgccctgctgctgtggtcgggtttcagtggcctcgtcccgtggacgcagcctcgccctgccgctgtggtcgggtttcagtggcctcgtcccgtggacgcagcctcgccctgccgctgtggtcgggtttcagtggcctcgtcccatgggcgtgctttggcagctttttgctcacctgtggagcctctcttgagcttttttgtttgttgtttgtttttgtttgattttgtttgattgtttgtttttgttgtcgttgttgttgcccaggctggagtgcagtggcgcgatctcagctcactgaaacctctgcctccttgggttcatgccattctcctgcctcagcctcccacatagctgggattacaagtgcccgccaccacgcctggctaaattttgtatttttagtagacagggggtttcaccatgttggtcaggctggtctggaactcctggtctcacatgatccacctgcctcggcctcccaaagtgttgggattacaggcgtgagccaccgcgcccagcctctgttgagcatattttgaggttctcttggtgccagtgatatgtacatgtgtccccatcgcaccatcgtcacccattgaggtgacattggtgcctctcctcggggtggatgcctccctctgtttccagcaacttctgaaggattttcctgagctgcatcagtccttgttgacgtcaccatcggggtcacctttgctctcctcagggctcccaggggaggcccgaatcaggcagcttgcagggcagggcaggatggagaacacgagtgtgtgtctgtgttgcaggatttcagaccctgcttctgagcgggaggagtctcagcaccttcagggtggggaacccagggatgggggaggctgagtggacgcccttcccacgaaaaccctaggagctgcaggtgtggccatttcctgctggagctccttgtaaatgttttgtttttggcaaggcccatgtttgcgggccgctgaggatgatttgccttcacgcatccccgctacccgtgggagcaggtcagggactcgcgtgtctgtggcacaccaggcctgtgacaggcgttgttccatgtactgtctcagcagtggttttcttgagacagggtctcgctcgctcacccaggcgagagtgcagtggcgcaatcacggctcgctgtagcctcaatctccctgggctcaggtgatcctcctgcctcaccctctgagtagctgggactacagacacataccaccacacccagctagtttttgtgtattttttgtggggggagatggggtttcgctgtggtgcccaagctgatctcaaactcctgaggcacaagcgatccacctgcctcggcctcccaaagtgctgggatgacaggcatcagccgtcacacgcagctcaatgattttattgtggtaaaataaacatagcacaaaattgatgattttaaccattttaaagtgaacagttcaggctgggcgtggtggcttatgcttgtaatcccagtactttgagaggctgaggtgggcagatcacctgaggtcaggagtttgagaccagcctggccaacatgatgaaatccagtctctactaaaaatacaaaaattagccgggcatggtggcaggtgcctgtaatcccagctactcgggaggctgaggcaggagaatcgcttgagcccgggaggtggaggttgcagtgatctgagatcatgccactgcactccaatctgtgtgacagagcaagactctgtcttgaaaaataaataaataaaaaaaattttaaaaagtgaacaattcagggcatttagtatgaggacaatgtggtgcaggtatctctgctactatctacttctagaacactttcttctgccctgaaggaaaccccatgcccaccggcactcacgcccattctcccctctctcccagcctctgtcaaccactaatctactttctgtctctgggggttcacttcttctggacgttttgtgtgactggaatcctgcaatatgtggtccctgcgtgtggcttctttccatagcattgtgttttccagattcacccacacattgtcgcacgttatcagaatctcattcctgactgggtgcagtgggttaggcctgtaatcctaacattctgggaggccaaggcgggacgatcacttgaggcaggagtttgagaccagcctggccagcctagcaagaccccagctaccaaaaaattttaaaagttaactgaacgtggtggtggtgggcacttgtggttcccagctacctgggaggctgaggtgggaggatcgcttaagcccaggaggtcaaggctgcagtgagctatgatcgcaccactgcactccagcctggacaacagagcaagaccctgtctgaaaaaaaaaacaaaaaaaaaagttcctttctttttgtggctggatgacatcccattgtatggccacagcacattttgtttgtctgtttatcgggtggtgggcagtggtttccaccttttgtctcctgtgaataatgctgctgtgaacatttgaattcaagtttttgtttgaacacctgttgtgaattatttggatatatgtgtaggggtaggattgctgagtcctatggtaatgttaggtttgacttactgaggaaccattaaactgttttcaacagtggctgcgccgttctgcatccccaccggcagtgtgtgagggttctgactttacctcctcacaaacgcttcttttccatttaaaaaaatattcagccaggtgctctggctcacgcctgtaatcccagcactttgggaggccgtggcgggcggatcacctgaggtcaggagttcgagacgagcctggccaacatggtgtaaccccatctctaccaaaaatataaaaattagccgggtgtggcagcgggcgcctgtaatcccagctacttgggaggctgaggcaggagaatcacttgaacccgggaggcagaggttgcagtgagccaagatcgcgccactacactccagcctgggtgacaagagtgaaactccatctaaaataaaacaaaaataaaaataaataaaaatttattaaaacattcatcacagccagcctagtgggtgtcccatgtggctttgcctcgcatttccctgataactaggatgctgagcgtcttgtcccaggcttgccacacctcagcactttgagatacgtcgcacagtccccatttgcgaacgagaaatgaggtttagggaacagcagctgtgtcatgtcacacagcgagcagggggtctctgagccgtctgaccccacagccgaccaagctccaatccttaccgcctcctagtgttgtggatgtagcccagggtgctcccacatttttcagatgagaacaccgaagctcaaaacaggagcgttttgtccacattggatacacgatgtctgtggtttggtcctgaagtcactttatatctcagtggtccagactggagtaggacagggggttctggggaatggggaaggtgtctcaggtgaaaggaaggaattccagattctccatactgtccttgggaagttagaagactcagagggtctggcaaagtcagacaaagcaagagaaatgcagtcaggaggaagcggagctgtccaggaacaggggggtcgcaggagctcacccccaggaactacacttgctggggccttcgtgtcacaatgacgtgagcactgcgtgttgattacccactttttttttttttttgaggtggagtctcgctctcttgcccagtctggagtgcagtggcacgatctcggctcactgcaagctctgcctcccgggttcatgccattctcctgcctcagcctcccgcgtagctgggactacaggcgcctgccaccgcgcccggctaatttttgtatttttagtagagatgggatttcactacattagccaggatggtctcgatctcctgacctcatgatccgcccgtctcggcctcccaaagtgctgggattacaggcgtgagccaccgcgcccggcccgatttcccactttaagaatctgtctgtacatcctcaaagccctatacacagtgctgggttgctatagggaatatgaggcttacaggccatggtgctggacacacagaagggacggaggtcaggaggtagaagggcggagagagggaacaggcggaggtcacatccttggctttcaaaatgggccagggagagacaccctctgagcatggtaggacaggaaagcaagattggaacacattgagagcaaccgaggtggctgggcgtggtggcttacgcctgtaatcccaacactttggaaagctgaggtgggtggattgcttgaggccaggagttcaagaccagcctggccaacatggtgagaccccgtctctactaaatatacaaaaattagccaggcgtgatggtgcatacctgtaatcccagctgcttgggaggctgaggcaggagaattgcttaaacctgggaggcggaggttgcagtgagccgagatcccgccactgcactccagcctgggccacagagtgagactccatctcaaaaaaaaaaaaaaaaaaagataaaaagaccaaccgaggaattgaagtgggggggcgtcacagtagcagaagggggatcgtggagcaggccaccctgtggtcatgcactggaagctcattacctgacgatttggagctcatcactgggggcctaaggagaatagatactgaaggatgaggagtgatggcgcggggcacgggtgtctttggtggccagaacttggggactgctggggtgcctcactgcaggccttctcagcgccctttatatgcttacacaggctgtttctaagagggggatacattgcataagcgttttcagactacctcatcatgggtccctttctttaccctctgtggccctggtggcgcactctctgggaaggtgcaggtggatgcccagacccgccctgccatccacctgcacgtccagagctgacttagcctcgagattgctgctggcacctcctgccccgggacacctcggatgtgcccgtggagatgctggctctgtgttttctgctggagtttggtgcgtcttttcctcctgcaagtggccaccgctcttgggtatgtcctcaggcttctgcgagtcatggctgcttctcaggtccttgcccagcgccaggagcaaaccctcctggcactttgttcaggggtggatgcgccagtgttcctgctgtggacccccatctcacatgagggtcttgggcctgcaggctcgttcaggaaacacccgctgagtacgcagtgtgtgccagctgtgtcccaggcaatggcggggacagtggctgctgctggggttgtggtggcttctggggactctggggacagctgaggtgcaaggagccacggctccttgaggatgcagttggactccaggtggaagggatggttgggggaggtataaatggggtcagggaggagacacatttggaacaatgggaacatttttaagatgctatgtcgggaggcaacaaggtggccaacccaggtgctgaggagcccacaccagccctggacgtgttttgccgctcacctttgctggggagtggtgggagagaggattccgttccacgtggtggtgtgcgcagctgggctgtgtggagctgggcgctaggaggaaggtgctttctgcggggctagccgggctctgcctttgaacacaatcaggctccaggttttcagcatccagtgcatgagaggacttcacgggcagctgtggctgatcccttgatgaattgggagaagaacaaaggtctatgaaatgaggtttcatgtagatggcattagagacgcccacaacagatttacagagtggagcggagacggcggatgggtctgggaggcccctcctgctggccttgactgtgacagctgtcctgggaatcagcttccaggccgccccagcagcctgactgacacacacaggggttttagccccatcctgcgaccagctgttgccatcatcagtgacagctgggagtggcggtggttccagccctgggcaccctccccacctgctggggcccacccagggcagtcctgacacctacaggttgcttggagccgcatccgagtcctgccccaccacgtgtgaagcccgagtggtcgtgggctgaggtcccctgattgcatccccacttcccttctgcttcacatagctgcctcttctcaccgtttttccagcctcctgggctaggaattccagtgttgtgctggctttgccccaggacacctccttagccctcttcctgagtctagagccccgggggttggaagttctggcccctgggacacctgcagccacactcagcttctcctgtgagcctccagcatgtcccctcaggaccaagccctcacgttcttgcctccccgcccacctgggctcagccaggggaaggcctggctgggagcgtctcccctctgccctgcccttctcccctctaccctgcccttctctcctctgccccgccatggcttttatatcctgtgccacaagacatggctgtgtgtgaaagtggcagggtctggcatctctgtgggtctctgaggcccacgctccagtgccactcttcccacccgctggccgtgccctcatgctggagggacagcccagccctctcccgaaccccagccccatgtgcccagctgcccccggccctctcccctggaagccggggtcactccagccgtatgccatggtggggacatcctgcttccttggccttccagggaaggtcctctttccaaatggcgacacctggtccctgcctggaggctggaagctgtggcccttgtatgcccctccagggtctgtgcgctcggttggcccgagttcccatcaccgtcatcatcaccatcatcattgtcatttcgcttgtctgtgagccggcctggtctcccagagcagagaccctctgaggtccagcctgagttggggtctccgtgctgacccctgacggggactcaggacgtaccaggtctgggtcaggagtgacccccaaacctcgtgccctttgacaggcacccctgacttttgctaagtgggtggaggtgacatcacttacagcgggagtgatgggacagggtctgttggctgcactgtgctcccagggatctggggagaggctatatccctgggctttggcactgcagagctgtgtgtgtttgtgtgtgtgtgtgtgtgtgtgtgtgtgtgtgtgtgtgtgtgtgtgtgtgtttgcgtgcgcgcacatgtgtataagatctttttttattacatgaagcaagataactgttgctgtttccttttgggttttgtgttcaacagagtggggtacttcttccctcagacaacagaactctcccctttaaacacgtgctgtcagagggtgggtcttgggctcatgtctgtttgcacagccgagtcagaggaaacacagggttcttcataaaaacactgcacagcaggcgactgtccagagtcagcctgcaggacggcagcagccctgcccctcagagcacagctagggtgggctgctttgggatctcccgtcattccctcccagctggcagccggcggccggcccattccttggtgtgctggtcaggggggcgtgcgcctgctctgctcaccctgggaatgggacagaagctggcagctcggagaggacagggctggacccttgggtggcctctggctggaccatctcattgtcctcagacacagcctctcgggtctagtttcatttcctgaaaaacaagtgcacagaactagagcaggagtcgagagctacggcccccgggccagatccagccctgccacctgttttcacaccatgctcaagctgagtgggttttacattttttaattacttgaaaaaaaaaaagccaaaggaggtttcatgacccatgaaaattatatggaattcaaaaaaaaaaaattatatggaattcaaatttcagtgtccataaataatttcttgagacagggtctcgctctgtcacccaggctggagtgcagtgctatggcatggctcgctgtacccttgacctcccaggctcaagcgatcctcctgtctcagcctcctgagtagctgggactacgggtgtgtgccaccaagcccggctaatttttttttaattttagtaaagacagggtctttctatgttgcccaggcttttctggaactccatcttggcctcccaaagtgctgggattacaggctcgagccacggagcccagcctgtttttgttttttcactgataaagttttgccgggtgtggtagtgtgtgcctctagcgatttgggaggctgaggtgggaggatcgcttaagcccaggagtttgaggctgggctcaagtgatcaggaggtgaactatgatcatgtcattgcattccagcctgggtgacagagcaagaacctatctcttaaaaatatatatttaaaaagtattgggtgtggtggctcacgcctgtggtcccagctacttaggcatctgaggtgggaggatggcttgagcccaggagtttgaggttgcagcgagccaagatcgtgtcactacactctagcctgggtgacagagcccagaccctgcctctttaaaaaaaaaaaccaaaaaacatgtattggaacacagccatgcctgttcagtcacgtgctctccatgctgctttctgctccagagacccttatggcctgaaagctgaaaatattttctatcctttacaaaaaagtttgctgacctctgtcctggaaaattcatctcccaagttctcttccggcactggcgttcctgggtgtcctaaatttggcccctgttatttctgaactctgttttggctctgttccctcccaggagccaggacaggcacgttctctgcatcttgtcccctgacgcccagaggcttggctcggctcaggcattcttggaaatatctggctccaggaaaggcagaggcctcctgagtcagcccagagggaacctgccccaggtctgggggaggcctgacccagcagagtggcttttgccgatgggttgggccggtcaagatgtgctgaaagttgtcctcagaaggccactttgggattccttcctccagtattagagcaactgagagctgctcattgcaagcctgatgttttcccagttggccgggtccaccgggtgccctgggattctgggatctgggtggaaagtagggggcttgggggagtgtcctgggttctggaatccaggtggcaagtggtgaggttcagggagtggcttctgagccaccataggggtctctgtgggaggctctgcccatccaggagattccgcaggccctgccggcccagagccagcgtcttgcgcttgccgaggctacagccagccccagccgggtggaacagcccgtcgcctcctctcactttgttttggggccacctgggagtgtggagcaagggtagagagggaggaagtggctgccggccgctgcccagcacccttgtttgccttgggccctctgtgggctcctttttattgctcttcaatgaagccagggaaatggacttccttgcctcacttcagttcaacatgtctggaagtttggtattaaaattaagaaagtgtggaaatagagcaagaagagaaaaatctctccaagagataatagtgacctctgagctgggcgcggtggctcacgcctgtaaatcccagtactttgggaggctgaggcgggcagatcacctgaggtcgggagtttgtgaccggcctgaccaagatggagaaaccccgtctctactaaaaataaataaataaataaataaataaatacaaaattagccaggcatggtggcgcctgcctataatcccagctaaggcaggagaatcgcttgaacctgggaggcaaaggttgcagtgagccaagatcacgccattgcactctagtctgggcaacaagagtgaaactccgtctcaaaaaaaataaataaataaaaaataaaaatagtgacctctggccaggtgtggcagctcatacccgtaatcccagcactttggaaggaaggccgagatgggcagattgctttagcacaggagtttgagaccagcctggccaacatggtggaaccccatctctacaaaaatagaataaaatttaagaggtaatagtgaccttttggtagatcgaaacctggattgctttctttttctaaatgctgattcttttctttgtggtgtttgtgttctgtgccgatgtccctcccccagccctgttattgtgagtggaagaaggggaaagggttcgcccgctactgtgagcccctcctctcacgctgggtgtccttggagaagcctgcacttcttcattgtacgccagggctgggtccctccctggagtggttctgtgctgctgggatggggccaacccctcagatgttttctgagtgtcacacacaggtgtgtgcattcatggcctttgcgtgtcttcctgttgtggaggcaaaaatgtgaagaaccctagatgattttgggaccagggctccatcacctgctgttcattgcacaccggagcatccaggcatgggtggagagctcagacttccaggcacggtcgcaggggctggtctaaccatgttcccgcccgcctgctcgtcagaaccgcctgttgggagctgttatcatgataccatacctgggccctgggctatccgattctgacttaattgctccaggttggggccaggccgttgtttgctgttttgttgtttcttctgtgacgttagccactgggctaatctgagcccctcagttacaggtggagaaactgagacccatgggggtgcaaggacttgccgaggacccagagccccttgggggcagagctgaggcggggcctggctttgggtcccagagcttccagtccccttcccgctctcctaacagcttttttttttgagacaagatctcaccctgtcacccaggctggagtgcaatggcatgatctcggctcactgcaatcttcgctagctgcgttccagcgattctcctgcctcagcctcccgagcagctgggattacaggtgtgtgccgccatgcccagctcgtttttttttgtacttttagtagagatagggtttcaccatgttggccaggctgatctcgaactcctgacctcaaatgatccgcctgcctcggcctcccaaagtgctaggattacaggctgggatcacactgtgcctggccctagcagctttgtcctgtgccatccaacaacagatgaccgaagtctttgtttcttaacatgcattccatctgccttacagttttgccacctgcaaaacagaggacttgtcgcttttctggtaagctggaaatgtaatctggtagcaggaggcctgtggaagcttgcctttaatggccttgtgtctctttcatcctgtcctgagagccggagaacttggatgttgcacctaactcaaccttcctgttaacatacagttctgcaggctcatggatcatcagaaccacgtcctatctcacgcggctgtatgcttccgttggttcaggtgtttttaccttgacagtattttctcctcggtggcttttgcggtggttgcttttaatcagcattgactcttcaagaaaaatatttagctgctacatctcagaggagacagggtggaaagcatctgagacctgcaggctcagacttagaaccagaagtgccctcagagttcatccggccctgacccagcgggaaatgagttcacagagaagcgggagaactttgccccaggccctgccgttgctcataactgccccaggtccttacatttgctccaggtcctgccccaggccctgcagttgctcataactgccccaggtccttatatttgctccaggtcctgccccaggtcctgcagttgctctgtgtggtgggtgtgatctggagccctccgcccattgctgcacctggggcaggcattgctaattgatcccaggactccttcctgcggagcacgccctggttctccaggcagccgctgcctgtcagcctgcagtggttcgggagaggacacctgcttgcctggtctgttccaaatcttgcttctcatcccagcacaggtagggggtgctatgggaaagggatcctcagttggccctgtcactgctctatcagctggggacgtggcatcctagtgaaaacatcatggccgggcgcggtggctcacgcctggaatcccagcactttgggaggctgaggagggtggatcacttgaggtcagaagttcgagaccagcctggtcaacatggtgaaacccatctctactaaaaatacaaaaattcgccaggtgtggtggcgggtacctgtaatccgagctactcgggaggctgaggcaggagaatcgcttgaacctgggaggtggagcttgcagtgagccgagatcttgccactgcactccagcctgggcaacagagtgagacgctgtctcaaaatctcaaacaaacaaacaaacaaaaaacaaacaaacaaagcgtcatttatccagcacccctggggaaccatgctacctggtgttttatggtacctggcaaggtgcaggtgaagttgctgctcttgggcattgaacccgtcttgtttggggcagctcaggccccaggcagggtccgggttggctctcgttggtgtggccctggcccatccagacctatatttctgccgtcctgcaggtgatcaatgttgatgggacgaagaggcggaccctcctggaggacaagctcccgcacattttcgggttcacgctgctgggggacttcatctactggactgactggcagcgccgcagcatcgagcgggtgcacaaggtcaaggccagccgggacgtcatcattgaccagctgcccgacctgatggggctcaaagctgtgaatgtggccaaggtcgtcggtgagtccggggggtcccaagccatggctcagccatgcagacttgcatgaggaggaagtgacgggtccatgcctgggcataagtgttgagctcaggtgccccgacctggggaagggcaggacaggaaaggtgacagtatctggccaaggacagatgggaagggaccaagggagctgattagggagtggttatggactaggaatgtcggtaacaatggttagaaagtgactaacatttgttgagcacctgctgtgtgcccggccctggccgggagccttcgtgcccacagtgaccccgtctgcaaatgtagttccttgccctactcgcactggggagcaggacgcagagccgtgcatctcacaggtgccaagctcaggactccctcctgggtctgcctgggctgggctgtgcttgttgcccctgtggcccacgcatgtgcaccttccacctgaaagccaggatcttcaggacgctccccgaggaggtcgttgtctggcacaatgatttgtctcttcctgaaaaggtgacagagttacactggagagagcagcatccaggtgcggcagggacaggcctggggctcgcgggcagggactctgtgtcctgccggggtcccacactgcacctgcttgtcagaggcactcagtcaatctttgctgatgaaggatgagaggacagaggacgtgatgcttgctgctgcattgcctgcagtcctgggtgagatgcccgggttgactctgctgcccgtcgggtggatgtgatgtcagatccccggctttaaaatacgagggagctgggaattgagggagcaggttggggcagaaagcacagccccgtggaagcctggagctgaggcagtgtgggcgacccctggagcagtgagtgcttccttcatggccttcatcgcaccctgcagtcctcatgtaggggatgccatccatgaatttagttttcccagcctcctttaaaaacgcgttcatgctggggccggggcagtgcagtggctcacatctgaaatcccaccactttgggaggccgaggcgggtggatcatgaggtcaggagatcgagaccatcctggctaacaaggtgaaaccccgtctctactaaaaatacaaaaaattagccgggtgcggtggcgggcgcctgtagtcccagctactcgggaggctgaggcaggagaatggcgtgaacccgggaagcggagcttgcagtgagccgagattgcgccactgcagtccgcagtccggcctgggcgacagagcgagactccgtctcaaaaaaaaaaaaaaaagtacaaaaaaaaaaaaattagtctgggtgtggtatcacgcgcctataatctcactactcgagaggctgaggcggagaattgcttgaacccaggaggtagaggttgtagtgagcccgtatcgtaccactgccctccacctgggcaatagagcgagactctgtctcaaaaagaaaaaaaaaaaaagaacatttatgccaggtgtggtggctcatgcctgaaatcccagaactttggaagactgaggcaggaggatcacttgagcccagaaatttgagagtgtcttccctgggcaacatagagagacctcatctctaccagaaaaaaaaaaattagcccggcatggtggcatatccctgtggtcccagctacttagggggctgacgtggcaggatcacctgagtctggaggcagaggttgaagtgagctgagatcatgccactgcactccagcctgggtgacagacagagaccctgtctcaaaaaaaaaaaaaaaaaaaagcatttactatccaccatggaaggtgagactgacctgtgagtgattgttcaaagaacaaaaaataaaccccagagataagacaaaagggtgcctccatgggggtgtgatttaaagctgagaaattgggcttcttccccctcccctctcaccccgtggtttgctaaaggagatgggaaaaaggattctttttttggctgaaatatttaacactaaattaaagccaattttaacagcactttggttgatgagtgaaattaacagactggccaaaaataaacgaacggtctgtactatgtgaaaaagaggcagctttggccatgctgggccaatgtgagttttcagggttgctgggaatgtctgtgaatcggaggaagggcctagctgggactctcaggagccaaggccctgaggggcaacttgcctggtccctgccctgaggcgttcactgctttcttcctgggccagatcacaggcccggaggctggaccactgggctggcactcttgccgagctgctccctgacttcctgaccatgctcctttcagcagccttgctgcactttagtttccttgaatgaaaaatggggatgagaatagctcctacctccaaggtgaatggagtgagttcggacaggtgactccctgggaccagtgcctggcgcctgacaaggtccagtcagagcccgcactgctgttactgatacccttggctgtaccaggggagaacttggttgccattgccaggtgttctcccaccacccccactactgtccctgtttgatgtgtggcgggaataaagctgtgcacattggagcttttggcacatcctggctttcaggtgaaaggtgcgtgtgtgtttgagggtttagcctggccaacccagccatgaggtcggacctgacctgggggtgagtcctgagctcggcacccctgagctgtgtggctcacggcagcattcattgtgtggcttggccgcacccctttccctgctgggctgttgatgtttagactggagcctctgtgttcgcttccaggaaccaacccgtgtgcggacaggaacggggggtgcagccacctgtgcttcttcacaccccacgcaacccggtgtggctgccccatcggcctggagctgctgagtgacatgaagacctgcatcgtgcctgaggccttcttggtcttcaccagcagagccgccatccacaggatctccctcgagaccaataacaacgacgtggccatcccgctcacgggcgtcaaggaggcctcagccctggactttgatgtgtccaacaaccacatctactggacagacgtcagcctgaaggtagcgtgggccagaacgtgcacacaggcagcctttatgggaaaaccttgcctctgttcctgcctcaaaggcttcagacacttttcttaaagcactatcgtatttattgtaacgcagttcaagctaatcaaatatgagcaagcctatttaaaaaaaaaaaagatgattataatgagcaagtccggtagacacacataagggcttttgtgaaatgcttgtgtgaatgtgaaatatttgttgtccgttgagcttgacttcagacaccccacccactcccttgtcggtgcccgtttgctcagcagactctttcttcatttatagtgcaaatgtaaacatccaggacaaatacaggaagactttttttttttttttttgagacagagtcttactctgttgcccaggctggagtaccgtagcgtgagctcagctcactgcaacctccgcctcccaggttcaagcgattcttctgcctcagcctcctgagtagctgggactacagacatgcaccaccacacccagctaattttttttatatttttagtagagacagggtttcatcatgttggccaggctggtcttgaactcctgacctcaggtgatctgcccgcctcggcctcccaaagtgctgagataacaggtgtgagccaccgttcccggcataggaaaactttttgccttctaaagaagagtttagcaaactagtctgtgggctggccttctgattctgtaaagaaagtttgattggtggctgggtgcggtggctcacacctgtaatcccatcactttgggaggccgacgtgggcatatcacctgatgtcgggacttcgagaccagcctcaccaacgtggagaaaccccgtctctactaaaaatacaaaaaaaaaattaaccgggcatggcggcgcctgcctgtaatcgcagctactcaggaggctgaagcaggagaattgcttgaacctgggaggcggaggttgtggtgagctgagatggcaccattgcactccagcctgggcaacaaaagtgaaactccgtctcagaaaaaaaaaagtttgattggtgtaaccaaagcgcatttgtttatggattgtctgtggcagcttttgttctgccgagatgagttgtgacagatctgtatgggctctaaagcctaaaacatgtgccatccgcccctttacagaaaaagtgtgctgacctctgttctaaagtattggacaactacaatgtttgctcatttattattctatgatttgttttctgctttttgttgttgttgttgttgttgagatagggtttccctctgtcactcaggctggagtgcagtggtgtaatctcagctcactgcagcctcgacctcctgggctctagtgatcctctcatctcagcctccctagtagctgggactacaggcacacaccaccactcctggctgattttttttttttttttttttttttgtggagacagggtttccgcatgttgcccaggctggtttcaaactcctaggctcaaacacccacctcagcctcccaaagtgctgggattacaggcgtgagccaccatgcccagcctattctactgtttgtattacatagctttaaaagattttttatgactttaagtcacaagggttctttgtagaaaaaaatatatatataggaaagtataaaaagaaagtaaaaattgtccataacctctccagccagagacgaccgttgctgacacctcagcatattgcctttaagtcttttttctctaagatagcatttctcttcatcacagtcatatgctacgcagaattctgtatcctgattttttcacttgacattacaacaggtatttgatggcgctgtgacaaactctttggcacaatcttttaaatgtatgaaatactccactgcacagatgtttgcttttaggcttaactgttcttttattttgcgtgtgctggttacagccgggcacagtggctcatgcctgtaatcacaacactttgagagggtgaggcaggaggatcacttgagcccagaagtttgagaccggcctgggcaacatagtgagaccccatctctacaaaaaacttttttaataagtcgggcgtagtggtgcatagctgtagtcccagccaccaaggaggctgagttgggaggattgcttgagccccaggaggttgatgctgcagtgacctgagattactccactgtactccaacctgagcgacagagcaagacttgtctggggaaaaaaaaaaaaaaaatatatatatatatatatatatatatacatatatacatacacgcacacacacataatataaaaatatatatttataaatatataatatataatataaaaatatatatttataaataaaatttataaattatatttataagtaaatatataatatataatataaaaatatatattatataatatataataaaatatataatataaaaatatatatttataaataatatataatacatacttataagtatatatttaaaatatatgtaatgtatattttttaatgtatgatatataatatacatttataaatacacatttatattattttatataaaatatatataaaatctccaagttgctttttccaaaaaggtgtcttgctgcatttcaaacattcatttaaaaacttgaatgctggtgatctggtccagaatgtgttcagtagctgctgccagtggccaagcatctcgggagatgtctacaaaacacgctggttctggcctggcgtggtggctcacgcctgtaatctcagcactttgggaggctgaggcaggtggatcaactgaggtctggatttcgagaccagccttgccagcttggtgaaaccccatctctactaagaatacaaaaaaattagccaggcgtggtggcatgtgcctgtaatcccacctacttgggaggctaaggctggagaatcgcttgaacccagggggcagaggttgcagtgagccgagatcgcaccattgcactccaggctgggcaagaagagcgaaactccgtctcaaaaaaaaaaaaaaagatgctggttcctaaaatgtggcccttttcctcctcacctgctgccagaccatcagccgcgccttcatgaacgggagctcggtggagcacgtggtggagtttggccttgactaccccgagggcatggccgttgactggatgggcaagaacctctactgggccgacactgggaccaacagaatcgaagtggcgcggctggacgggcagttccggcaagtcctcgtgtggagggacttggacaacccgaggtcgctggccctggatcccaccaaggggtaagtgtttgcctgtcccgtgcgtccttgtgttcacctcgtatgagacagtgcgggggtgccaactgggcaaggtggcaggctgtccgtgtggccctcagtgattagagctgtactgatgtcattagccttgatggtggccaggactggtagggccctcagaggtcatggagttccttcgtggagcgggtgctgaggctgtatcaggcacagtgctggctgctttcacctgggccgtctcaccgaagtgtccatggagcctgcgtagggtgggtatctgtgtcgattttacagatgcagaaacaggctcagagaaaccgagtgacttccctaaggtcacatacccagttagagcagagctgggccaggaagtgctgtctcaggctcctgaccaggtctccttgctttgcactcttgccaaaaccatgatccagaactgactttgaggtccccggacctcaggctcctccgaaatggcctcttggaggctgctgagccacagcttaggacccacctcgagaggcaaatgtgctttgagctgccaggcgtcctgggggccctgccttgggcacggggttcagacaggccccagatgtgtggggcgtctttctggacttgagttttcttttctgtgtggtggacacagtgctcaccccttaaagcacctgtgatgtgtgcagcagcccaatccctgcctgtcgcctgttctgctagggaaggaaggaagacttcaggatggcaggacaacagaaagaggtccaggttttagagcaagggcaggtcaaacttagaaaattctggaatgaggatgtgcatttcctcttctggatctgctaaaagaagagggaaggaggggctgctgggggaggagcccagagccgagtttacatccggatcccgcaaggcctcccctgccctgaggtcttgttttgtgatgtgcttgtgtccatcctggtttctgccgtgtccccaacatccggccaagcttaggtggatgttccagcacacactcaccctgtctgtgcacctgtttttgtgtccgtaagtgggtatttactcaccttacgagtgagccactgtgggaattcagggaggtggcgcagtgaccacccctggagggatatgtgtgtggcaggggtcgagggtctcgcccttccctgcttcctgcgcgtggctttctccaggacggggagggctgagctgaagaggtggggacagttgcgtccccccgccacccactgtcctgcggtgagagcagactcactgagcctgcccttctcccttgtgccttccagctacatctactggaccgagtggggcggcaagccgaggatcgtgcgggccttcatggacgggaccaactgcatgacgctggtggacaaggtgggccgggccaacgacctcaccattgactacgctgaccagcgcctctactggaccgacctggacaccaacatgatcgagtcgtccaacatgctgggtgagggccgggctggggccttctggtcatggagggcggggcagccgggcgttggccacctcccagcctcgccgcacgtaccctgtggcctgcaagttccccaacctggcaggagctgtggccacacccacgactgcccagcagcctcaccctctgctgtgggagttgtccccgtccacccctgggtgcctttgctgcagttatgtcgggagaggctctggtgacagctgtttcctgtgcacctgctgggcactaggtcccagctaatccctgtgccaggactctaatttcaccctaacacacatggtggttttcattgctggggaagctgaggcctgagcacatgacttgccttaggtcacatagctggtgagttcaggatcccccagagataccagggccagcactcgatccccacccagccctgaaccccaccatgtgctgggattgtgctgggagtgtccacacgcctgggaccccagggctggtgctctcatctcctttttccagatcatgagaatgaggctcagggaagtttgaaaaaaacctatcccaagtcacacagcaacaggagcaggatttgaacccagaaaaggggaccgcacactctgttctgctagagtagttagctgtcctgggtgatatggcaggtgacaggggcaactgtgcttaacaaaggaacccccatcccccctgccaagttgggagactagaaggtcaggggcagaagctctgaagggccaggtgcagtggctgacacctctaatcccagcactttgtgaggccaaggcgggcagatgatttgagcccaggagttcaagatcagcctgggtaatgtagtgagacgccatctctacaaaaaaattttttaaaaattagctgggcatggtggttcatgcctgtagtccaagctacttgggaggctcaggtgggaggattgcttgagcccaggaggttgaggttgtggtgagctgtgatcatgccactgcactccagcctgggcaatagagtgagaccgtctccaaaaaaaaaaaaagaagaagaaaaagaagctctgaggctccaagtccccaggcaccccttggcttgagggcagacaagggaggagagggtcacctgggcagccctgacttttgtcccctggcaaagggaccttcagtgaccttggccctaggagagcctctgagcacgtcagccatgtcgaaccgctcaggaagggcagcaagaatttggcttctgacctctgcctctcctactcgccatctgcactgggtgtggttgtgcccattttacagatgaggaggctggggcatcgaccagctgaatgccttgtcccaggtactgcgtaggcagagctggcagttgaaccccgtgtcctggttgtcgctgggggtgggctgcaccctgacttgtgaggccagtagcaaggtttgcacgtgacttcgtgaccgtcacccagctctgcagcacatcccgtgacccagctcatccaggccgcatgcaaacctgttgccaggcgagaaaccagtcaccgcacagctgtggttgcctgaaatgattaagctcattaatcaccccggagtgaggacagactcagatgaaaaccagcaaaagccctggaaactcatgtgaccctgccaatgagggcggccatgtgcattgcagcctggccgtcactcctcggtacgtgttttggacttaaacgctccggatgtttactgagtgcttgattaataacatggaaggcctggtctcattgctgtgggagtgaaggatgcacagccaggcctgacatgatgagaacaagaacctggagtctcgctgcctgggtggtaatcctggccctgccacttagcaactgtgtgactgtagccaggtcacttaattttgctagatcctgcctgcgcttcagtggatcttgctggttttccaaggtggccaaacactttaaggcattcatgtggtcgctaggctgcagggttgaaccctggctcaccccgcagggcgccgtgtgctctgtggcctggctgtgcctttgctgacaccgtgcccgtgtgtgttcatgcaggtcaggagcgggtcgtgattgccgacgatctcccgcacccgttcggtctgacgcagtacagcgattatatctactggacagactggaatctgcacagcattgagcgggccgacaagactagcggccggaaccgcaccctcatccagggccacctggacttcgtgatggacatcctggtgttccactcctcccgccaggatggcctcaatgactgtatgcacaacaacgggcagtgtgggcagctgtgccttgccatccccggcggccaccgctgcggctgcgcctcacactacaccctggaccccagcagccgcaactgcagccgtaagtgcctcatggtcccccgcacctcactccctcgttagatcaggctggttctgggagctgacgctgaaaggagcttctcatctggggttcctgggtgtacatagatggttgggtaggttgtgcactgcacaagctgcatgatgctacctgggggtccaggtccaggctggatggacttgttgcttcatcaggacatagataaatggccaaaactcctcagctggaaggtcctgggcaggatctttgggtgtgaaaaccagtcacaggggaagggtgcttgctcatactgccagcacagtgctgagtgctttccatagcgctcgtttactcctcaagcctggagggtggggagtagcatggtcccatttcacgtacaaggaacccgatgcacagagaggtgtggcaacccatccaaggccatacaactggggtgggttgagccggggttgactgtggcaggctggctcaagagtccctgctcctgaacccttgccaggcagcctggcatcagctcggggaatttttgccctgacccttggaagcaagtgggcctctttgttctcatgtcagtgatgagaagagtgactttcctatggcccctctggagtacaggtgtttcctgttggcgggctcttcccccatgacatcagcagcgagctggttatgattccctacgcagaacttgatagtttataaagctctttgtcatccaggccccgttggagtctcacgcagacctggtcgcaggcggggctggtcttgcctgtcccagctgcatggatggggaacttgaggcttgcaaaggttaaggggctgttcgaggcccaggctggcaggagatgggcctgggccagagtctgggacttcccatgcctgggctgtctttggtcctgttgctcaccatccctccctggggccatgaccttagagagccaaatggaggtgcaggtaacccacggcaaggaggggttgccatgactcagagtccccgtcctgtggccggcagtacctggtgcaacgacttggatttcagaccagccactgtagcccgctgacggtgcgctcgaagtgccacagcttctgaagccaggcaggactcaggccaggagactctgttagctgttgagagggagaggccaacggatgttctggttctgctagagagctggttcttcggatcctggtaccagtgcactgagaggaggcccagcttgattctggggctgccttgtggtggcatgtgctgctcactgacaccctcgaggagtgtcttctctcgggcttgttgactgtgcccggttttccgcagttcactggtgcacacataggcacatagcaaaccgcacacacagtcgtgggtatgagtttcactacattccaccaccagtgttcactaccattacctgccttccgtcttaagtgttcatcatttaaaaataaatttattgggctggacgcggtggctcatgactgttatcccagcactttgggaggctgaggcgggcagatcacctgaggtcaggagttcaagaccagcctggccaatatggtgaaactccatctctactaaaaatacaaaattagctgggcatggtggggcatgcctataatcccagctactcaggaggctgaggcaggagaatggcgtgaacccgagaggcagagcttacagtgagcccagatagcaccactgcagtccagcgtgggcaacagtgcgagactccatctcaaaaaaaaaataaataaataaaagaaaaataaatttatgatctatttcaaaaataacacatgtactttgaaacagcagagacacatatgacacggagaatgaaattccccatagcgcacccccaagagacagccctggtccccccgtctttcccgtggacctccagcggggcagatgctgagccgcctgttgtcgagtggcgtgctatcccgtcctccagctcctctgtggcttacagacacccacctgcagccctgtctttgcctcctctagcgcccaccaccttcttgctgttcagccagaaatctgccatcagtcggatgatcccggacgaccagcacagcccggatctcatcctgcccctgcatggactgaggaacgtcaaagccatcgactatgacccactggacaagttcatctactgggtggatgggcgccagaacatcaagcgagccaaggacgacgggacccaggcaggtgccctgtgggaagggtgcggggtgtgcttcccaaggcgctcctcttgctggtttccaggctgctgcccctgtccttagcagagggaggaaacagaggatggctctgggtgaatgatgacttgggcttcgattatgtagtcacagggtatgaccctgagatgcgtggaaccccgagactgtgattatatgtagaaactgggtttccccgttgtttaagtagtcatggtggggtcagaccccacaggacttttgtcttttcaagaaagaaaatggtcgtgtgtcatgcaggggtagttggtactggttaatccaggtttatcctttattttgtgggaactgtacagtcatttctgctacaatgctgtatatgctcttctgaaagacacctatgcaaaatcgcacagtaaaaatgacacaactcatagggaaagcggggccagggcacagccctcaaaatctccatcaatgacatgtaagaaaagagaggaacctgggaaatagcaaagtgccttttgcacattaaatggttagctatatcccacaatactgtgcattcgtaaacgttaatgctgcaataaatacggcacttcaccttgggaagatctggagttggcttatgagtgtggaagggtgtagcgcatgagtttttgtgaaacactggaaggaggattgtgggaaatcaaatggaaagttctcaccccaggcgtggagaagagtgggtcatggccccagcagtgagcccagggaggtcagagacggaggtgtgtgtgtgggtgtgaccctgcgcagttccctgccggctgtagttttttgcattcgcttaatgtttctcgtggaggaaattgtgcatgagcaaatgtgaaaccgtgctgtgctcaaattgtcctaatacatcattgcattggaacagattggcttttttttttttttttttttttttttttttttgagatggagtctcactctgtcaccagcctggagtgcagtggcatgatcttggctcactgcaacctttgcctcctatgttcaagtgattttcctgcctcagcctcctgagtaactgggattacaggcatgagccaccgcggccggccagatttgcatttttgaaacaactgctaggctgggcgcggtggctcacacctgtaatcccagcactgtgggaggccgaggcaggtggatcacctgaggtcaggggttcgagaccagcctggccaacatggtgaaaccccgtctctactgaatatacaaaaatcagctgggtgtggtggcgggtgcctgtaatcccagctactcaggaggctgaggcaggagaattgcttgaacccaggaggcagaggttgcggtgagccgagatcacaccattgcactccagcctgggcaacaagagcaaaactccatctcaaaaaataaaaaatagaaaaacaagtgctgtagcggaagtgagcactttgcggagtcaggcttgtgtggcctgttccacaaatgatgtgctcacggtggcctcaggcccacctggagtctgcagcatggggcacaacaggttcattagtgtagaattccaggacaggcctggctcctaagcagccttcttttacaaaaactgcagagcccgcctgtatcctagcactttgggaggccgaagtgggtggatcacgaggtcaggagttcaagaccagcctggccaacatggtgaaaccccatctctactaaatatacgaaaattagctgggtgtggtggcacgcgcctgtagtcccagctactcgggaggctgaggcagaattgcttgaacctgggaggtggaggttgcagggatctgagaccatgtcattgcactccagcctgggcaacagagcgagacgccatctcaaaaaaaaaaaacctacagagccacacggcctctttctccaccgagtgttggtgtgggagcttgtgttattgtggtgaaatcttggtactttcttgaggcagagagaggctgagcgcctggagagactttcacatgggtcgccatgtccgccgtcggtttcgctgttgtgctccccatctgaaggctggtgccgtccagacaggctggacgcccctttccaccagatccttcctcccgcagcagtttctagttacgttgtactgtgaggtctgtgtccttggttgatggcaaaagtcagccgaattgaaattcagagccatgcctggctccctggagcttctctcctgggcagctgtgatcattgcctctgctgtggtgtgggtggtggaaatggattcctttcatcttgcttgctacaggtgactgtcacgtggagtcctttggagagagggacgtgttaattgatggatgtggctcccatgctgagaaagctcctgggcgtacattgccttagagtttcattggagctgcgttcttttatggtgtctgctaggcagaagtgatgaagacttggaagaaaacccagaaggttttccacttaatttggaaaatgtgcttttcccctcctgtgtcttttgctaaggtccagcctcctgcagcctccccgctctgtggactctggctttgattctttattaggagtccccctgctcccccaaaagatggtgtctaaattatcatccaattggccgaggttttgttttctattaattgtttttattttttattgtggtaaatttatataacataaaatttgccattttaattgttttgttattgttgtttttgagacagggtctcaccccagtgcccaggctggagtgcagtggtgcgatcatggctcactgcagcctcagcctccagggctccagtgatcctctcacctcagcctctctagtagccgggactacaggcatacactaccacatctggctgattttttgtattttttttttattgtagagacccgctatgttgcccaggctggtctcaactcctggactcaagccatcctcccacctcaccctcccaaagtgctgggattacaggcatgagccacaacacccagccattttaatttttttttttttttttgagatggagtctcactctatcgcccaggctggagtgcagtggcgtggtatcaactcactgcaacctctgcctcccaggttcaagcgactctcctgcctcagcctcctcccgagtagctgggattacaggtgcccatcactatgcctggctaatttttgtattttttagcagagacggggtttcaccatgttggccaggctggtcttgaactcctaacctggtgatccgcccgcctcggcctcccaaaatgctgagattacaggtgtgagccaccgtgcccggcctttttttgtttttgagacagggtcttgccctgtcacccagactggagtgcaatggtgggctcttggctcactgcagcctccgcctcccaggctcaagttgtgcacctccacacctggctaactgtattttatgtagagacagatttcaccatgttgcccaggctgggcttgaaatggactcaagcagtccacccacctcagcctcccaaagtgctgagattacaggcgcgagccaccgcacccagcccattttacctattctgcagttgacagttcagtggcattcagtcagttcacgaggtaaccatcactgccattcatctccagactacttcaccttctcggcagatgtccgaaactgtccgcattgaacacactcctcatctccctctgacagccaccattctactttgtatctctctctgccttctctaggtacctcatgtaagtggaattataccaatatttgcccttgtgtgactggcttctttcatgtgacatggtgtcctcaaggttcatctgtgttatagcctgtgtcagaatttccttccttaaagcctgaataataacccgttgtaaaggctgggcgcggtggctcacaccctctaatcccagcattttgggagtccgaggtgggcagatcacttgaggtcaggagtttgagaccagcctggccaacatagtgaaaccctggctctactaaaagtacaaaattagctgggtgtggtggcgcgcacctgtaatcccagttactcaggaggctgaggcaggagaatcgcttgtacccgggaggcagaggttgcagtgaaccaagattgtgcctctgcagtccagcctgggtaacagagtgagacttcctgtctcaaaaaaaaaaaaaatcatcggatggatggacggaccacttcttgttatttatccatccacgggtgctaggtttcttccacctttggttgtcgtgaataaggccactatgaacatttccttccgtggtgaaggttttgtactagtgaggaaaaggcgtgtttgtggtgttgcataggattctggtaagaaagtttgcactaaccataagtatttgtactacattaaaatgaaagctcaggggccgggcgcggtggctcacgcctgtaatcccagcactttgggaggccagggcgggcggatcatgaggtcaggagatcaagaccatcctggccaacatggtgaaaccccgtctctactaaaaataccaaaaaactagccaggtgtggtggcgggcacctgtagtcccagctacttgggaggctgaggcaggagaatggcgtgaacccgggaggcggagcttgcggtgagccgagatcgcttcactgcactcgagcctgggcaacagagcaagactccgtctcacgcaaaactctgtctcacgcaagactccgtctcaaaaaaaaaaagagttcagggtttatgaaactggccagccgcgtaaagtttgctgtgttgtttttgtgcccgggaggagtgtggccagggtgtcacgtcacacagtacacgtttctcagatggtggttctccagactgctgtcccaaagtctgtttttgcatctggttcccacagacccaccctccacggtgagcctgattttggccagggtagctggaatcttgcttgtctttcagcccggcagctgtaccagtccagggtccacagctagtggcttttaggaaggaatttgttcagttggctttgacacatggccccctagggtccacagctctgtagtgatgtggatgttgttatctacaaagacacatgatccttcgtgtccagatgaaagtgatgatgtctttgcagctgcccagcaaggctgtgtgtgtgtgtgtgtgtgtgtgtgtgtgtgtgtgtgtggtgtgtgtgtggtgtgtgtgtgtgtatgggggagggaggcaccctttccatctgggggtgtgtgtgtgtggggtgtgtgtgtgtgtgtgcgcgtgtgtgtggtgtgtggtgtgtgtgtgtgtatgggggaggcaccctttccatctgggtccaagagactgggcctggggaagacgcttctttttatctacttagagactttgttttatttgtatttttttgagacagggtctcactctgtcacccaggctggggtatggtgatatgagcatagctcactgcagcctcggcctcccaggctgaagcgatcctcccacctcagccttctgaatagctgggactgtaggcgtgcgtcaccatactgagctattgttttttttgtttggttggtttaattttttttgatacagatggagtcttgctatgttgcccagactagtctcaaactcctgaactcaagtgattctcccacctcagtttcccgacattctgggatcacaggtgtgagccactgctgtctccctgttttattaactgctgaaagacctagataaagaaagtctgaaaagacttactatcagagcaccatcctaagatgattccctctgactcaatggagagggaggggagcttttccttcaggcctgggtggcaggagcccaggtgctccaggccccatttgccccaggccaaatcactcgggaacttggatgcagctgtctttcagggtaacccaaaggaaccagatccccgcaggcagtaggcttctgggctgtcctctcctcctacgtcagctcagtaagagcccttcgaagggatgctgtgtcggaggccccaaaagcccaggctcatccctgagatgcacagggtgggctgggcttaggcagcgctcgagcatctcctggacggtgaccccagagagtgtggagacggagagtccttgagagtcactgagagacgtggctgccctgccttcccaagaggggctctgagtcattccccacactcacctgcccctacccaccctcacctggcccccagcctcacctacccccacatctgtaccgatccctttacccgcaccttccctacccaccctcacctcccctgtaccttcacctcccccactcacccgcccctgcaccctcacctgtcccccaccttcacctaacccccaccctcacctgccctcccctcacctggcctccttccgttggggaaggggttgtaaggggcggcccccaaactgtctgtcctggtgccctgcagagaaaacagtacgtgagggccgcagtccaaaagcttgagtcctggaaggtggaggagacagggatgtgttgggaagggccccatggtcttggatcccttctcgactgtcaatggggccttcatgggagcgccagtctagtgatgcacagctgggtgcccggcgggtggctgaggaggcctaaagtccgaggcggcaagagctcttccagaggctgttgtcctaatcgctctggcatactcaggcgggcacgtagttaggagctgattggagaggagagacccccacaccaatactgggatttgactttcaggctaaacttgagaagtgtggcctctgctgtcctgccagagctctccagccagtgcccagggctctccagccagtgcccgggggtctccaccagtgcccgggggtctccgccagtgccaggggtctccgccagtgcccaggggtctccgccagtgctcaggagtcttggtttctttgtcttacagccctttgttttgacctctctgagccaaggccaaaacccagacaggcagccccacgacctcagcatcgacatctacagccggacactgttctggacgtgcgaggccaccaataccatcaacgtccacaggctgagcggggaagccatgggggtggtgctgcgtggggaccgcgacaagcccagggccatcgtcgtcaacgcggagcgagggtaggaggccaacgggtgggtgggggtgctgcccgtccaggcgtgcccgccgtgtcttatgccgaatgccagcctctcacaggctggggagactttccacctggggatccaatgggtggctttccagggtcccaaaagcaaacacaggtttttcacagcccgtccgggaaagcagaaagccccaaggggctggaaggggaaagggggagctctgctgagaggttacaaggcagcgctggccgacgggagttgcagttgataggttttgtatcatccttgttaaacttgaaccctgtgcagaaatcccttccacggcatgggggctgcctgttgactcgctcctgttccaccacagggagctcctgggcttcttcctcccagaggcccccgacgctcccacctgttggtcgtcagagcttctggttggtgggaaggcacccaggaccttgaggtctccagagagaaaagccagggaaagagggagaccgaaacccatgtgacatgaaactcaggctccaaactgagcacgggaacgtttggggacaggagcgcgatggccttcctcagatagctggggggctggcatgaagacgggagctacagccagcacaggtcctgggccgggagcccagagattgagccctgactctgtcacttactggccacgtgaccttgggcgggtggcatagcctcttggagactcagtttcctcattggtaggagtgacggccacagtggtgcggcctctgcagcacacggggggctcggtgggcggaagccccgggtctataaggcggctgtgcaggagccagccgagctggtctcccaacagccagggctccggggtccttagcagctgtggggggcctgcacctgtttcccatggctgctgtcagaaattaccagaagccaggtggctgagagtaatggacacttgttctctcacagttcctgagggctgaagcccgagatcgaggtgtgggcagggccctgcgccctctgaaggctctgagggaacctttgggcttctggtggctccaggcaccccttgacttgtggtcctgtcactccagtctctctgtctggctgcacatggcgtggcctcttctgtaccattgaaggacacttcagttggatttagggcctaccctcacccattgtggtcgtatcttgatccttcatgacatttgtaaagaccctgcttccaaataagctcacattctgaggttctggggtgagcgggaatttggagagcattgttcaactagtatagaatgtgacctgtcagcctcgggcagccctgagaggcaggggctttccacagcccagctgggtgccctgggctccgtgctgtccgaggagacgccatccccacacccgtccttcacccgccaccctcccgcaggtacctgtacttcaccaacatgcaggaccgggcagccaagatcgaacgcgcagccctggacggcaccgagcgcgaggtcctcttcaccaccggcctcatccgccctgtggccctggtggtagacaacacactgggcaagctgttctgggtggacgcggacctgaagcgcattgagagctgtgacctgtcaggtacgcgccccggggcctgccctaaccgcagacacccggccttcattgtcagtaatggcagcagctgccacattgtccgagacctgccgtgagcccagtgccgcgccaggggctttgtgtgtagcgtgttttgtcctcacactgacagctgtaggctggggttctgagtgagccccacagggcagaggcagaaaatgagtctcagagagggtgagcgagctgcttggggccccacagcaggagatggagcaggactgcagcctagcctctgcccccagcacctgcgcaagaagctgctctgctctggactgtgttaggctgcgagggctggagagaaatgagagttggtgcttagagagggggcgcaggtccccatggcttttcctcttatgatgaggtagatgggtgaagggaggggccatgcttgcaggggccagtgaccgaggcccgccgttggaactgatggccttcatcccgagcccagcccaggtgggagcagggctttccgagggcttgtcttgggtcggcctgcttccagggactctgctgcagctcccacccctgtccaaagcatggaatcccccaggctccctggcagtcctgtcaacctctgtcctcccaagctgagtgtggggcaagttctggaggtcagcactgctcaggggggcccacgggctgcttgcaggggccaaccgcctgaccctggaggacgccaacatcgtgcagcctctgggcctgaccatccttggcaagcatctctactggatcgaccgccagcagcagatgatcgagcgtgtggagaagaccaccggggacaagcggactcgcatccagggccgtgtcgcccacctcactggcatccatgcagtggaggaagtcagcctggaggagttctgtacgtgggggctggcagtggggtgggcagggtggcctctaaacccgacccctggaggaggctggaggccagtgcaagatcctgtgtggcctcagccaggcggtggtctctgccagatgccaactgttgcccgctggggttcagcgacatgtccgaatgtcccgaggcctctgaggttgttttcttttgccgcagaacaaatcaccacgaacagcgttttaagacaacaccaactctttttttttttttttttttgagtcaggatcttgctctgttgcccaggctggggtgccctggtgcaaacacagttcactgcagcctcgacctctgggcttaattaagtgaacaccttgcctcagcctcccaggtagctgggactacaggtgggcaccaccacacctggctaatttttttttgtagagacggggtttccccatgttgcccaggctggtctgcaactcctgggcacaagctatctgcctgctgtggcctcccaaagtgctaggattataggtgtgagccactggcctgacaacacccacggattgtctctcagttctgtaaggcaaagtccaggcacagcgtggctcacctgggttctctgctcagggtctcacggggccagaatcaaggtgtcaggaacgctgggccctcagcggaggctctgtggagaaattagcttccttgctcactcagcaggtagcagttgtgggatcgaggttctgttttctctctggttattggtcggggaccactctcagctcctagaggccaccacaggtccttgccccgtggccctctctgcctcagcagtgggggctccctgcgtcagtccctcccacaccttgagtctctctgatttgcttctaaagggccctgtgattcggctcagccacctttagattaggttagcctcccctttgatagactccaagtcggctgattaataaccttaatcacatctgcagaatcccttctgccacataaggtcatgacgccgtgctggggactggggtgggaaattacggggtcatttaggattctgcctgccactgccttgctgtgtcccagggcttgggggaggggcctccacagctgggaccacagtccttcctcccctccatggtaaccatctgaggattacttgagaccagcctgggcaacatggtgagaacccatccctacaaaaaatacaaacaaaaagggaccaggctgggcttggtggctcatgcctataatcccagcactttgggagaccaaggtgggctgatcacttgaggttgggagttcgagaccagcctgcccaacatagtgaaatcccgtctctactaaaaatacaaaaattagctgggtgtggtggcaggcgcctgtattcccagctactggggaggctgaggtgggagaattacttgaacctgggaggcggaagttgcagtgagccaaaattacgccactgcactccagcctaggcaatagagtgagactccgtctcaaaaaaaaaaaagggccaggggtggtagtgacaaagagaccctatcccaaaaaaaccgaacactgaatccttgagactgagtaaggacactgtgaaatttttctgggtggggcagggaacagagcgtcttctgtcatttcttccacctgggtgtggtcagctctccctccaagctgcctcctcttcttctcattgtccgggtgttggacacatttggttaactggatagaataacgcgagttcccagggacttggtccatttgctattttattttattttattttattttattttatttatttatttatttatttatttatttattgagatggagtttcgtttttgtcgcccaggctggagtgcagtggcgcgatctcggttcactgcaacctctgcctcccaggttcaagtgattctcctacctcagccttccaagtaactgggattacaggcacccaccaccataccaggctaatttttttgtatttttagtagagacgggttttcgccattttgcccaggctggtcttcaactcctagcctcaggtgatccacgcacctcggcctcccaaagtgctgggattacaggcatgagccaccacgcctggcaccatttgctattttaattcccatgtgtattagtgtcccacggctgctgtaacaaatgaccacaaactggatggcttaaagcaacagaaatggattcccccaatgtgctggagaccagaagcctgcgaccaaactgttgggagggctgtgcttcctctgggggctccagggaggatctatttgttggcccttccagtgctgtgggtgccagcgttccacacttgtggatgcgccgcctcaacctctgcccatcttcatgtgtccatctcctttgtgtctgcgtctttacctcttcttcttgtctgtgttgcctcttataaggacgtttgtcattgggtttagggcccacccaaatcatccgagatgacctcgtcttgagatccttaacctgcaaagaccctttttccaaaaaaaggttatgctcacagattctaggccttaagacatgggtgtatctttctggggggcactatccaaccccttatacaatgaaagacgggaagagggccaggtgtggtagttcacgcctgtaatctcagcactttaggaagctgaagcgggaggatcacttgagcccaggagtttacaagtagctaggcaacatgatgagaccccatttctacaaaaagtgaaaaaaaaaaaaaaaaaaaaaaagccaggtgtggtggctcacacctgtaatcccagcactttgggaggctgaggcaggcagatcacgaggtcaggagattgagaccatcctggctaacacggtgaaaccccgtctctactaaaaatacaaaaaattatggccgggcgcagtggctcccgcctgtaatcccagcactttgggaggccgaggtgggtgaattacaaggtcaagagatcgagaccatcttggctaacacggtgaaaccccatcaagatcacaaggtcaagagatggagaccatcctggctaacacggtgaaaccccgtctctactaaaaatacaaaaaattagccgggcatggtagcgggcgcctgtagtcccagctgctcgggaggctgaggcaggagaatggcgtgaacccgggaggcggagcttgcggtgagccgagatcgctccatgccactgcactccagcctgggtgacagagtgagactccgtctcaaaaaaaaaaaaaaaaaaaaaaaaaaaagaaaattagccaggcacagtggcaggtgcctattgtcccagctacttgggaggctaaggcaggagaatggcatgaacccgggaggtggagtttgcagtgagccgagatcatgccactgcgctccagcctgggcgatagagcaagactctgtctcaaaaaaaaaagccaggcatggtggtgcatgcctgtagtcccagctactcaagaggctgaggcaggagggttgttcgacccacggagatcaaggctacagtgagccatgatcgcaccactgccctccagcctgggtgacagagtgtgaccctgtctcaaagtaagtaaataggaggagagacaagtgggcagttcagactgatggtatgggcacagtagagactggtgcagacaggctggcctgtgatgtcaagcaacttctgtaattgtttccggcatccatttgtgtgtcaatttccgtgtcagtaggaagactctgtaggctgccaagaggaataagtgggaggatcctcccagagaggccgggcctgcaggagggccagttctcatgagttctcatttggcccctaccctccaggctgtggttctgaggtgggagacagagcctgacctctgtttgtcttgttttgtctttgcagcagcccacccatgtgcccgtgacaatggtggctgctcccacatctgtattgccaagggtgatgggacaccacggtgctcatgcccagtccacctcgtgctcctgcagaacctgctgacctgtggaggtaggtgtgacctaggtgctcctttggggtgatggacaggtacctgattctctgcctgctaggctgctgcctggcatccttttaaaatcacagtccctgtggcatccagtttccaaagctgattgtgtcttcctttgccctcctttcttttctactatgtgcattcggtgctatgaattttcctctaagtactgcgtttcctgcatctcacaaattttgttacattttcattttcaggtagtttgaatatttttacacttctcctgagatgacatctttggctcatgtgttatttagaagtgttgcttagtttctaaagagttggggcttttccagctgtctctctgcaactgatttctaatttaattctactgtagtctgagagcttattttatatgatttctgttattttaaatgtgttgggtgtggtgtttttgttgttattgtttttgtgtctttttgttttgttttgcttcgtttgttttgtttttgagacagtgtcttgctctgtcactcaggctggagtgcaatggcgcgatctcagctcaccgcaacctctgcctcccgggttcaagtgatcctcttgcctcagcctcctgagtagctgggattacaggtgcacgccaccatacccagctaatttttgtatttttagtagagacggggtttcaccatgttggtcaggctggtctcgaactcctgacctcgtgatccgcccacctcggcctcccaaagtgctgggattataggcgtgagccactgtgcctggccattaggtgtgttttatcacccagcatcatgcagtttatcttggtgaatgttctgtgtactcttgaaaagaatgtggattctgctgttgttgggtggagtgttccagaaacatcaattagatccagttggttaatagtgctcatcaggttgtctctatccttccttcctgactgcctgcttgagctgtcagttattgacaggggtgtggagtctccaactctaatggtggatttgtttatttctcctagtagttctatctttttctctccttctacccttgatcctcttctccccctagggcttcctggtgttagtggtgggagagtggggtagtgaagaacctggactttagggccaaagaggccagggttcaaatcctggctctgtcacttcccagttgagtgaccctggctggtgcctgaatctctgtgagcctccacttcctcctctgtgaaattgagagcacttacctggcaggctgtcatgggcatcaagtaacagggcactccacctggaccctgacacgtgatgcacaggaatgccagctgctatgccatgggtgtggcagtagtaataaagtgaccatctgtatcctcaccacagtgaagcctgtccagggctttctctcctatgcccccatgcctccaggtggccttggatcctgttggttctgtgctctgctcagcgacctttctcccgtgggagttcctgggggttcagcttcatcctacagacagcagcacacactggctgtgcaccctttttttttttttttttttttttttgagatggagtctcgcttttttcgcgcaggctgaagtgcagtggtgtgatcttggctcactgcaacctctacctcctgggttcaagtgattttcctgcctcaccctcccaagtagctgggattacaggctcccaccaccacgcccggctaatttttgtattttcagtagagatggtgtttcaccatgttggccaggatggtcttgaactcctgacctcaggtgatccgcccacctcagcctcccaaagtgcagggattacaggcgtgagccaccacacccggagtgccggttgtttttagcagtttgtcttgttcctggagagactggctcctgcccaggagctcggggagtagggccgcggggtgctgcctcacacctcgagtttggccgtaagcagaggggacattttgtgactgtccccctcctgagcttcccagcagcttttctccaagttacagcccaaaagctcaggtggatttgcaacccaacggtgtctgtgcacctcccactgatgcccgaactgccctggccaagaaacggggccgtcagaacgctgcactaactgcagccttgggcctccatgccagaggccatgcccttccatccaccaccccctggcctgggccctgggccctcctggctcgggaactccaggccccttcctcacggctcgagagacgtgtatttaccgcacaggtgcttgtcattctcttgtggcctcttctccagggagatcacagaaggacagggcctcactgaggtctcggacatggaccctttgatagtggcaggagccaggctgggcaagaggcggccacagtcacctcagcagtgccatcaccaccgccattcagcccttccctgagccgggcgcgcccctggctctggccccagtgtcccagttacagctcacaggagcttgtggtgcccagcggctgcttctgattgagagtcgaggtcggaggctttgggaggctgagaggctgctcggtttcacaactgctgagggagacttgggctccatctcaggtatgccccatgtcgccctcaacctccagccaccggtcctccgtgtcccccatggccaggcacggcttgcagacatctgtcgttggctcctctcagccgtcgtgggctgaccctggcacgtcctcctgtggctgagcccagtggggacagctgcttccttttattaccctagaactctcgtctttgatcaggccccctcccctatgccacacagtccctgtcactcgggtgagcccagtagtcatggggaaggcctgcgggttccaaacatccaaaggcttgcgtgcagcatgacagcttgaaaccgatgttttttaccttgatcagatttcagcttggcgggggctttgctcagctttcagtgaggcctgggccgatttcccagcatcccctcctgaggccagcctctgtttcctgtgattttctgcacaaagtgggagggaggagtcctaggaaatggggggccacctcgaagcctaggcctcctctggcttctctgtgccagtgcccccacgctttgtgtctgtgtccccagcccatgggactctgctattccctgagtgctgccgcatgcccagcccgcactgaggacgtggagccccgaggggcaggatggcctccatggtcacacgtaggaagtggcctccaccctccgatgatcctctccctcctccctttcagcgccctccccgggggtgtcctcagccctcctgcctgtgctttgtcccgtcttctgcaggcgcctgggacgtgctgacaggtcctctgccggctcctgccttgctatgcgcacgctggtcaccacagaggcctggcccttcttctgtagcagtcccacacccgcaacaggtgtggctgctgaccacctgctttctgcccctctggtcctgaggagggcgcagtgggcactcaggcgtggctgagcagatgtgtgttgccgggaggaggaaggactgctccagtcagggctgaatttcccacccggagcatttctgctgtatttggtgtagcgcctgctgcttaaagctctgattcccagttggcaccctttcccttctgcattgaaaaacatacggatgcatgtcttcttgcagtgaatgtgtattctcccagcctctcttctgggttggggctggaggtggagcggcacacaggagccgcagcgatggaggatgtgcgggtgcagcaccccgtacagcagggatgccaaacccgcgctgagtccctctcaacttctgctttgaagcccagtcacgccattgcctgggttttgctgggcggggctgcgtgtgatgttctcctctgtccctcccccagagccgcccacctgctccccggaccagtttgcatgtgccacaggggagatcgactgtatccccggggcctggcgctgtgacggctttcccgagtgcgatgaccagagcgacgaggagggctgccccgtgtgctccgccgcccagttcccctgcgcgcggggtcagtgtgtggacctgcgcctgcgctgcgacggcgaggcagactgtcaggaccgctcagacgaggcggactgtgacggtgaggccctccccgtcaaggctctgccaagaccctggccctgccctccgggatacgagcttggggctgcctccggcctcacaggagtaggggctctgaaaacctttgcttgcagggagattgccaagtctgtcttttaggcccaacaaggaaaactctgcagttccacccatcctgtcccaccaggtagtgtggcttgaaggcagactgtgagggtctatctcaccttcctgcattaggtcaggagtttcacagaaacctgaggcacattcaggggtgggctgcagaggtccatggctcacaccctggaaaatccgcccccaaaagacagtgctgtctccactgaccagtctgtgggatagtgcttaagcctgagtggtttctatcaacatgtagaatcaggaggtataaagagatttgctcaggcatcctgggccctctctgaccagcaggatcttcctttagatcttgacagtgaaacacatctcttctgtgccccctgtgagttttctttcattcattcattcattcattcattcattcattcattcattcgagacagagtcttgctctgtcacccaggctggagtgccctggtgtaatctcggctcactgcaacctctgcctccagggttcaatcgattctcctgcctcagcctcccgagtagctgggatgacaggtgcgcaccaccatgcctggctaatttttgtatttttagtagagacagggtttcaccatgttggccaggctggtctcgaactcctgacctcaggtgatccgcccgcctcagcctcccaaagtgctgggattacaggcatgagccaccgcgcccggcctgagttttccttttatgaaggacctgcttggttggttgcctgccacatgttgtcagcaccatgggcccaggactgctgaggagctgttgatgccctcgctctcccagagccaccggctctgttagataattcacatgcagtctggccactgtcctacgtcctcattcacaaagagcagacatttcgtagaagatgagggcctgggagtaacctccctgcatgtttttctataaaggcatagtggttaagtccttccagctcattgaccattggagaattttatggaggctgtagactaggggctggtaaactaagggcccaggggccaaatccagcctgccacctacttttgtaaataaagttttcttggtgcacagccatgcccattcattcatttgcacaatgtctgtggctgctttcatgccaaaagcaagagaactgagtggttatgctggagacctacggccttcaaagccccagacctcacgtctggcccttgacagacagagcttccccagccctgctgcgcatcctggcccagcatgtgctgtgtgtgtgatttcagcttgcaggagccgtggttaggaattgtccctgtgttggtccattttgcattgctatgaaggagcacctgaggccgggtagattatgaaggaaagaggtctgtctggctcatggttctgtaggcagcaccagtatggcacccgcatctgctcagcttctagtgaggtctcaggaagctttgactcatggtgaaagtcgaagcgggagcaggtgcatcacatggtgagagagggagcaacggagagagagagagagcgcctctccctcttgccctcaccttgagaggagatgccaggctcctttaagtaaccagctcccatgtgaactcacagtgagagcccatttgctactgcggagagggcaccaggcatctgctcccatgacccaaacactgcccaccaggccctacctccaaccttggggtcatattttattctgttctatgctatgctatgctatgccatgccatgccatgccatgctattcctattctattatttgagacagaatctcgctctgttgcccaggctggagtgcagtggcatgatcttggctcactgcaacctccacctcccaggttcaagcgattctcctgtatcagcctcccgagtagctgggattacaggcacacaccaccacacccggctaatttttgtattttcaatagagatggggtttcaccatgttggccaggctggtctcaaactcctggcctcaagtgatccacctacctcggcctcccaaagtgccatgattacagatgtgagtcactgcgcccagtgagggtcacatttccgttgagatttggaggggcagacgttggagccatctgagccccctcgtcccgctctagcttctcctcccgtgtgccccgcggtgctggtggcaggcccttacgccggttctggctgcatgctctgttccagaagctttcttccctgcttggttaccagaaaatcatcccatccattacaaggacagggtccccttatctcccattcccagggcaggacaccgggggcagggcaggtggggaactgagcaagttctctgggggcaggcgtggctatggctccctctgggtgggcgtctggggaggggtggaggcagccgtcagcgccctggcttgctcttcctccctggccagagactgtggccttgtgctgctcccgtgtgggctgcctgcacctccagtgggttgtgctccctcccctcccctcccctcaagctctgctgagcaccactgccttccacagcccccactctcgggaggcgaggctcctcgtggccattcctgtccttggcacccacccccccaccaacctggtagagccttgggcggggtctgttactccttgcatggcgtagacctccccacagtaggcacctgacacatacctcctggggggcaggcaggaggtgcgttgaggtctcagccctggcagtccctcccctgcgtggcataggcctcgccacagggtcatcgagggtgggtggagactgtactagaccactccccgctggtcctagaaagggtcccatctgtctgctctctgtttggagtccagaccttggttgctgtgccctgcatggtgggctggggggcaccctccagcctctctgagtgcatggcctctccttgcagccatctgcctgcccaaccagttccggtgtgcgagcggccagtgtgtcctcatcaaacagcagtgcgactccttccccgactgtatcgacggctccgacgagctcatgtgtggtgagccagcttctggcacggggaaggggcgtccgggctgggttcccccaggaacgtggagtttaggggaggagacgtgcctttccagcggggctgggggctgtgtgggagactcaggcggctgggaggctccttgcgggaggcagggaagcctttcccagggcagcggccaggaggacagactgtgagctgtgggctcggcggctacagagtctgcctcagtgggcggggctgatggtgtccaggtgcctgcagcacgcacccacccacgggaccttgctgagcagcgtctgtcaggcagcaagattacccgagggctgcagtggtcctgttccctggcagcttactgtctggctgaggaggagtgatgttcacatatgcacacatgtcatgtgcacacacatgtacatgacaacatcccacatgctcctcaaatagcatgacctgtacagtcacggatatagggcctaggggataggaggccaagacagtcagggaagactttccagaggcagtggctcctgaaaggctgtctgattcaggcaggaagggagctgagttcagataggaagtagcaatgagtcattgtgtctggggacatggccactccttcgctgcagagggacctgggctgagagctcctctcttatggctgcagtcgggagagaagtctgttggggggagaagggggcttcctcaagggactccctgtgccctttggcaccttcgtgccaggtcaggcttgaggcctgaaggcagtggtgggggccaccaagggtcgcctcctctgctgggcaagttcccagtctgacgggcctgtgccgtgggccccagctgtgggggcgctgttgatgcgcagccaggcctcgccgccagagcccgcacgcttccattccgctgacttcatcgacgccctcaggatcgctgggccggccctgtgggagagtgaatgtggcttttgccaaagttgagtctggagcctggaaacttccctatgggcagccttgatagtggagtggcccaaggagcccacccagccgaccctgcccctcccgtggctggtgggcggcaccaggggctgcctggctttgctcgttcaccaacatcacctgggctggccagggcgcgctcacttctgccaccaccgagggccctgggcgaaggagtgaataccaggctgccttggcagggatgtgttgagggctgtggggagtcggacagcggcgggggtcagaggaggaggagggtgcaccgtgcaggctgaagggccacgttaccctgaggttggccaggctccccaggcctagcctcccagctcccccactttctccccaccctccaccagtggcaaagccagccccttcagggcgcacggtgtctgcccccaaggagggcccattccgttggggttaatgttggccacctctttctgtttgtctctggcagaaatcaccaagccgccctcagacgacagcccggcccacagcagtgccatcgggcccgtcattggcatcatcctctctctcttcgtcatgggtggtgtctattttgtgtgccagcgcgtggtgtgccagcgctatgcgggggccaacgggcccttcccgcacgagtatgtcagcgggaccccgcacgtgcccctcaatttcatagccccgggcggttcccagcatggccccttcacaggtaaggagcctgagatatggaatgatctggaggaggcaggagagtagtctgggcagctttggggagtggagcagggatgtgctaccccaggccctcttgcacatgtggcagacattgctaatcgatcacagcattcagcctttcccactgagcctgtgcttggcatcagaatccttcaacacagaggcctgcatggctgtagcaacccaccctttggcactgtaggtgtggagaaagctccttggacttgaccttcatattctagtaggacatgtgctgtgttgtccacaaatcctcatgtaccctagaaatgaatgtgggggcggctgggctctctccagagctgaaggaatcactctgtaccatacagcagctttgtcttgagtgcagctgggatttgtggctgagcagttacaattcctacgtggcccaggcaccaggaacgcaggctgtgtttgtagatggctgggcagccgcaccgcagagctgcaccatgctggtttgtatcacatgggtgaccatggtatgtctaagaaggtggagtccctgtgaggtctgcaggtgcccccacagctccaggccaccttgaggattgcctctgcctgcccagccctgagttccctctcccctgtcctgtcccactgtcaccccaagccggcctcattgggagcctgttggatggcagggtatagatgtaacctgattctctctggggagcggggttatctggcttctcaagagctcctaggagcccacagtggtggcaccatcacagtcgcagcagcccccagagaacgcggccctgtctgttcctggcgtgctctgtgctgccccgcctgggttccctgccccagtcgcaggccccttggaggaggtaccatgtgtctcccgtttcacagatgagccccggggagctcactctagtagtggccagagaggcctgcggctcagggagcggggcacatttccaacaggacacaccgccctggtctgagtctcgtgggtagtgggagcagaggagagcgccctatgtctgtggggcggcttggctgagcctggaagccacctgacctcccccgtcccttccctgccaggcatcgcatgcggaaagtccatgatgagctccgtgagcctgatggggggccggggcggggtgcccctctacgaccggaaccacgtcacaggggcctcgtccagcagctcgtccagcacgaaggccacgctgtacccgccggtgaggggcggggccggggaggggcggggcgggatggggctgtgggcccctcccaccgtcagtgctggccaccggaggcttcccgggttcctgggggctgtgccaccgcctctgaggcatgcttgctttcttcccttttcaaacccttctgcttccttctttaatgacattgttgattgtggataatctgaaaactacacaaaaatataaagagccaaaatctcacccaaatccacctcctagagtggctgttgggctccgtcagcatccaggcggccgtctgtgttccgcacggcccagcccatcgatagccgcctgcaccaggcctgtctgccctctgtgagcctccccacagggttccctccacaaacaccctgttctcccacccagggctggctgcttcctggaaaacagctggatggttttgtgcatgacagacaaacacagggtgattttcgtggctaaaatactccctggagcttttggcagggtgaggggctggctccagctgagccacgccttgagtgaaatgactgtgaggagaataaactgccgctgccctccaggatcactggggctggctggggagaacccccgtttctgggagcacagtcccaggatgccaaggcgagcttggtgccgagatgtgaactcctgagtgtaaacagcgggggctgacttgacatgctttgtatgcttttcatttgttcctgcagctgtatgcccctaaggtgagtccagcccccttctgcttcctctggggcctcgccagtgagccccaccttgctggggctggttcctcctgcccttctgggtatccctcacatctggggtcttgtcttcttgttttctttttcttttttttttgagacggagtttcacttttgttgcccaggcttcagtgcaatggtgtgatctctaggctcaccgcaacctctgcctcccaggttcaagcagttcccctgcctcagcctccctagtagctgggattacaggcatgtgccaccacgcccagctaattttgtatttttagtagagatggggtttctccatgttggtcaggctgatcttgaactccctacctcaggtgatccgcccaccttggcctcccaaagtgctgggattacaggcgtgagccaccgcacctggcctttttcttttcttttcttttcttttttctgagacagggtctcgctctgtcacccaggctggagtgcaatggtgtcatcatggctaactgcagcctctaccttctaggctcaagcaatcctcccatctcagcccctaagtagctaggactgcacgcatgcatccccatgcccagctaatatttacattttttgtagagatgaagtttcactatattgcccaggctggtctccaactcctggactcgagcgatcctcctgcctcggcctccccaggtgctgggattacaggcgtgagccaccgtgcctggcctggggtattgtcttcttatggcacctgactgtggtgggccctgggaaggaagtagcagaagagggttcttcttggtttcctggacagtaactgagtgttctggaggccccagggcctggctttgtttagggacaaagggaactggtaaccagaagccgagagtttaaacacccactgcccttcttccctgctcctgctgctgcaacccagcttaaccagccaggagtgctaggaacccaagcagggcccccgagcacacagcaggcagctcacgaattctcttttcctgttctcccttgggagctgggaggatcttaatcaggcaataagagatggcactgagcagccagctaattttttaaatcactttattgtttaaccatatgactcacccacttaaaaaagggtacagttcagtgggttttagtgtattcacagatgtgtgcaaccctcaccacagttaattttagaacattttcctgcccctaaaagaaactctgcatgaagccagctgtttttaaattagcaaagttattttgcatcctttaaatatatgttcatggtacaaaattcaaaagatacagaagagtctgcagtccaaagagactccgcccccatgacgccaagcaggcatccctgggaggcatggcctcctgcagtgtgtttcttctatgtccccccaggggtcatctgtacatatgcaagcatacaagagcgtggactttgttttccaagccagaagataattgtagatttatgtgcagttgtgagaaagagcacagacccatttatcctctgcctggtttcccccagtgctgcctgccatcttgcatgacttccattcctatcataagcaagacactgataacgattctttcaccttattcagattgacataagtgttttttgtttgttcttgagacaaacttcctctgtcacccagtgggagtgcagtggcacaatcacagctcactgcagcctcaaactcctgggctcaagcgattctcctgcctcagtcccctcaagtagctcagatggcaggtgtgcaccatcatgccaggctaatttttaaattttttgtggaggtgaggcctcactaaatttcctgggctagtcttgaactcctgagctaaagtgatcctcctgcctcagcctcccaaagtggtaggattacaggcatgagccactgcgcctgggctgacatatgtgttttcgtaagcccgaaagatagcatctgaagagtcaacattgagccttgccttttgctgctaacgatgtataaaagctgctgttctgagcatttcggaggctcccagctgccgtgtgcaccctgcctagagctctaccgtaacccatctccgggaggaggtgctattgttttcctcattttgcaacaaggaggctgaagaactgagcatgaaccactggcctgggtcgttcggttggtaggcagtggggccaggccatccaactcacaaccaccttctactctgcttcccccgcaccctgaagtttgttctgttttgaggacacagccgtcacattcttggtggctgaacagcactccttgtcaggcgtggctgggcccccactggagggcatcatggtcctctctcctgctgcggttgaaccttggctgtttcaaccactcctgccaagtggccctctgaaagggacagtccatcttttctcagcagagggccacactggcaaaacggtccctggcaccctttctctccacctgtctaatatagagtaaaaatggtatcatgttaagatcttcatttatatttattttatcatgaatgatgtaagcatcattttgtgtgtttaagaacctttgggcccagcgtgatggcttgcagctgtaatctcagcactttaggaggctgagatgagcggatcacttgaggccgggagtttgagaccagcctggccaacatggagaaaccccgtctctagtaaaaatttaaaaattagccgggtatggtgatcccagctacttgggagtctgaagcatgagaattgcttgaacatgggaggcggaggttgcagtgagccgagatcgcgccattgcactccagcctgggcgacagagcgagactctgtctcaaaaaaaaaaaaaaaaaagaaaagaaaagaaattatcaatctcctcttttatggcatatatatatatatatatatatatatatatatatatatatattttttttttttggttatgttcagaaaggccttccctgctctgatcataaaaaacaacttattttcacactctctctcttttttttttgagacagagttttgctcctgttgcccaggctggagtgcagtggcgcaatctcagctcactgtaacctccgcctcccgggttggagtgattctcctgccttaccttcccgagtagctgggattataggcatgcaccaccatgcctggctaattttgtacttttagtagagacgggggtttctccatgttggtcaggctggtctcgaactcgcgacctcaggtgatccacccacctcggcctcccaaagtgctgggattacagacgtgagccaccatgcccagcccacactctctttcttaacgtcctcctcctttcgttttacgttcacatctttaattcttctgggatgtaattagatttgatgagcaaggtgggcatccagcttgtttcttggctgatggcttatgggtggcgtgaattagtcggggtctatcaggaggcagaaactctatgagaatttgaacagagaaagttccgtctacaggcttattaccagggactggaatagcagaaattgaacagtgagatgtacagagaactctaagaatgcaggaataggccaggcatggtggctcacacctgtcatcccagcactttgggagaccaaggcgggtggatcacctgaggtcaggagttcgagaccagcctggccaacatagtgaaaccccatctctactaaaaatacaaaaaaattagctgggtgtggtggcgcatgcctgtaatcccagctactcgggaggctgaggcaggagaatcacttgaacctgggaggcagaggttgcagtgagccgagatcatgccactgtactccagcctgggtggaagagcggaactctgtctgaaaaaaaaaaaaaaaacaagaagttcaacttgaagggaaaaatgccgtattgtctttccctttgttatgtcaccagggcacagtccatcccaggctggcgctgatccacgggctggagaggggctgccccagaagaggacatgccaggaagggcttggctggtgttcaggagcccaggccaggtcaggtcaagaggtgttgaggctggacgggagaggccagctaggggctcatgtaggatatgaggggtcggcccatttcaacgtggaaactgagctcttctgcttctctttcttcttcactgcattaagattcaataccgcttgggaagcaggtatttcccttcctataaaggatggttgggagcctgagtgttgggagaaagtgtagccgctgagttactaacaactagggctgccgtcaagcctatggggaaagagagaagaggacatttggaaggagagagatcaagctgtggcaccctgggagaggaccacagaaaagaggccagtgagggggttccccggtggcatctgaaggtgtggcccaaccaggaggtccagaggctgccagccgagtggcccaggagagggaacctcacaggggctgagtgggacccaagccctatccaccgtcctaaccacccacatttctcgggaacaagacctcccacagtggcctccccggcagtggaaatagccaaactggcaacatggactttcttcaactgcccgggcgatgctgcctcagtgccccagggcaggcaggaagctcccacacccattctggaatgaggggttggaggaaggctgagctgagcaaaggacccatctctgctctggttggtggggagggagcccattatacaagagacccctcagggctcagtgaggggtgacagagacttggggagtagtggctgtcactgcagaggtgagagggtttggagagaaggtacatgcctttttggccacattgagtagcacctggtagccagttagtaacgtgtattggataaacaaaagattaaacggatgcaaaaaaaaatgttggctttgcttctttttacccaaacctcagttccctcaagtagattctgggaacaccccctacctggctggactgttgtgaagtttaaataagccaggttaacttcacctcctcctttaagacacagctcagacactgcctcctccaagaagccccctctggcttcctgtgtgaatatgacggccctctgggctctagggtatcttagaacaatgcttccttatggctttggaaccccgctgtctcctggattgggagcaaatgcaggggaggagccacacctgactaatctctgggtctcccagcacataagtggcataagggcagggctgtgcccgcttcaggcacttactgaaggatgtacttggcagagggtaggcagccggcggatgagcccctcactctccccagctgactgcgtgggcgggaaaggcgggttcaggagacccagcctccctgggctgtcaccacctctgcacatccagccccattgatcaagggttcaatttttggggtcctgttgggaggccaggagactctctccaggcacttcttccaggtctttgtgttagggtgtgtgtgtgtgtgtgtgtgtgtgtgtgtgtgtgttgtttgttttattttatttatttatttatttatttatttatttatttatttattttgagacgcagtctcgctctgttgcccaggttggagggtggtggcatgatctcggctcactgcaagctccgcctcccgggttcacgccattctcctgcctcactcttcctgagtagccggattacaggcgcacgcaccatgcctggctaattattttgtttttttagtagagacagggtttcgccacgttgcccaggctggtcttgaatccctggcctcaagcgatccgcccgcctcagcctcccaaagtgctgggattacaggcgtgagccaccgtgcccgcccagcctaggggtacatgaaacttttttttttttttttttgagacagagtttcactctgtcctcaggctggagtgcagtggcgtgatctcggcgtactgcaatctccgcctcccggttcaagcgattctcctgcctcagcctcccgagtagctgggattgcaggcacgcgccaccacacccagctaatttttgtatttttagtagagacgggctttcaccatgtgggacaggatggtctcgatctcctgacctcgtgatccgcccgcctcagcctccgaaagtgctgggattacaggcctgagccaccgtgcccagccatgatgttttgatacaggcatataacgtataataatcacatcagggtaaatgatgtaaccatcacatcaagcatttatcctttgtgttacaaaaaaaaatctaattatactttcctacttattcttttttttttttttttttgagacggagtctccctcagtcgcccaggctggagtgcagtggcatgatctcagttcactgcaagctctgcctcctagctctgcctcctgggttcatgccattctcctgtctcagcctcgcgagtagctgggactacaggcgcctgccaccgtgcccggctaatttttttttttgtatttttggtagagacagggtttcaccgtgttagccaggatggtctcgatctcctgacctcataatccgcccgtctcggcctcccaaagtgctgggattacaggcatgagccaccgcccccagcctatttattcttaaatgtacaataaattattgttgactccagtcaccctgctgtgctaccaaatacggatcttcttcattctatctaactgtatttctgtacctgttaaccatctctcctccacctcaccccccaaacccactacccttctcagcctctggtaaccatccttctactctctatctctatgagttcaattgtattaatttttagctccccggccgggcacggtggctcacgcctgtaatcccagcacttcaggaggctgaggcaggtggatcacgaggtcaggagtttgagaccagcctggccaacatggtggaaccccatctctactaaaaacacaaaaattagctgggcgtggtggtgggcgcttgtagtcccagctacttgggaggctgaggcaggagaatcgcttgaaactgggaggcagaggttgcagtgagccaagattgcgccactgcactccagtctgggtgacagagtaagattccatcccgaaaaaaaaaaagtttagctcccacaaataagtgagaacacgtgaagtttctctttctgtgcctcgcttgtttcacttaacataatgacctccagttccatccacgttgttgctttgttataaatgacaggatcttggtcaggcgcagtggctcatgcctgtaatcccagcactttgggaggctgaggtggactgatcatgaggtcaagagatcgagaccatcctggctaacacagtgaaaccccgtctctactaaaaatacaagaaattagccgggcgtggtggtgggcacccatttccgccccttctcgggacgctgatgcacgacatattacccatccccggaagactaatcctcccccactctatattgtacctcttcctttctcctccacgcgattccccgagtaacccgtcttccctccctcctcggattacgctcacctttccgcttcaatcacgttgctccgtccccttccccattcgtaccactcctcactttcgtcttcctacccccactatcccttttcgtcctctctattccttacttactcctcccccttctcttcatacttcattccctccgctcttcccactcgcgctcccactttcacctagttgccctcacctacgttgccatctcgccccttcttcagctctcggcctctcacccatctgtcctctctcttacctctctcctcatctcgctcagacatctctctagactatccctcactttaccttctcagtcgtcttcttcctatccttcgttctccatgatcttcacgtcgccatctcttttcgcccctttcatatgtctctcttcatgttctcactatcattctcatgatcactatcgttctcactacttatcactcccctctttcttcatcaattcctctccgtcattctcgtctctctcttacaaccgccttccttgtgctatctaactcaaccatgcctctcctactctctctctatcgcccctccatcgcttatgcatcctcttctattgcacacccgcccctccatcgcttatgcatcctcttctattgcacaccgcccctccatcgcttatgcatcctcttctattgcacatcctcttctattgcac

SEQ ID NO: 12 - DNA, 21 bp, Artificial Sequence
  Artificial sequence is a primer.
ctgagcggaattcgtgagacc

SEQ ID NO: 13 - DNA, 23 bp, Artificial Sequence
  Artificial sequence is a primer.
ttggtctcacgtattccgctcga

SEQ ID NO: 14 - DNA, 20 bp, Artificial Sequence
  Artificial sequence is a primer.
ctcgagaattctggatcctc

SEQ ID NO: 15 - DNA, 22 bp, Artificial Sequence
  Artificial sequence is a primer.
ttgaggatccagaattctcgag

SEQ ID NO: 16 - DNA, 21 bp, Artificial Sequence
  Artificial sequence is a primer.
tgtatgcgaattcgctgcgcg

SEQ ID NO: 17 - DNA, 23 bp, Artificial Sequence
  Artificial sequence is a primer.
ttcgcgcagcgaattcgcataca

SEQ ID NO: 18 - DNA, 21 bp, Artificial Sequence
  Artificial sequence is a primer.
gtccactgaattctcagtgag

SEQ ID NO: 19 - DNA, 23 bp, Artificial Sequence
  Artificial sequence is a primer.
ttgtcactgagaattcagtggac

SEQ ID NO: 20 - DNA, 21 bp, Artificial Sequence
  Artificial sequence is a primer.
gaatccgaattcctggtcagc

SEQ ID NO: 21 - DNA, 23 bp, Artificial Sequence
  Artificial sequence is a primer.
ttgctgaccaggaattcggattc

SEQ ID NO: 22 - DNA, 33 bp, Artificial Sequence
  Artificial sequence is a primer.
cuacuacuacuactgagcggaattcgtgagacc

SEQ ID NO: 23 - DNA, 32 bp, Artificial Sequence
  Artificial sequence is a primer.
cuacuacuacuactcgagaattctggatcctc

SEQ ID NO: 24 - DNA, 33 bp, Artificial Sequence
  Artificial sequence is a primer.
cuacuacuacuatgtatgcgaattcgctgcgcg

SEQ ID NO: 25 - DNA, 33 bp, Artificial Sequence
  Artificial sequence is a primer.
cuacuacuacuagtccactgaattctcagtgag

SEQ ID NO: 26 - DNA, 33 bp, Artificial Sequence
  Artificial sequence is a primer.
cuacuacuacuagaatccgaattcctggtcagc

SEQ ID NO: 27 - DNA, 45 bp, Artificial Sequence
  Artificial sequence is a primer.
aactggaagaattcgcggccgcaggaatttttttttttttttttt

SEQ ID NO: 28 - DNA, 13 bp, Artificial Sequence
  Artificial sequence is a primer.
aattcggcacgag

SEQ ID NO: 29 - DNA, 9 bp, Artificial Sequence
  Artificial sequence is a primer.
ctcgtgccg

SEQ ID NO: 30 - DNA, 14 bp, Artificial Sequence
  Artificial sequence is a primer.
gtacgacggccagt

SEQ ID NO: 31 - DNA, 16 bp, Artificial Sequence
  Artificial sequence is a primer.
aacagctatgaccatg

SEQ ID NO: 32 - DNA, 18 bp, Artificial Sequence
  Artificial sequence is a primer.
ccaagttctgagaagtcc

SEQ ID NO: 33 - DNA, 20 bp, Artificial Sequence
  Artificial sequence is a primer.
aatacctgaaaccatacctg

SEQ ID NO: 34 - DNA, 57 bp, Artificial Sequence
  Artificial sequence is a primer.
agctgctcgtagctgtctctccctggatcacgggtacatgtactggacagactgggt

SEQ ID NO: 35 - DNA, 56 bp, Artificial Sequence
  Artificial sequence is a primer.
tgagacgcccggattgagcgggcagggatagcttattccctgtgccgcattacggc

SEQ ID NO: 36 - DNA, 27 bp, Artificial Sequence
  Artificial sequence is a primer.
agctgctcgtagctgtctctccctgga

SEQ ID NO: 37 - DNA, 27 bp, Artificial Sequence
  Artificial sequence is a primer.
gccgtaatgcggcacagggaataagct

SEQ ID NO: 38 - DNA, 20 bp, Artificial Sequence
  Artificial sequence is a primer.
gagaggctatatccctgggc

SEQ ID NO: 39 - DNA, 20 bp, Artificial Sequence
  Artificial sequence is a primer.
acagcacgtgtttaaagggg

SEQ ID NO: 40 - DNA, 163 bp, Homo sapiens
actaaagcgccgccgccgcgccatggagcccgagtgagctcggcgcgggcccgtccggccgccggacaacatggaggcagctccgcccgggccgccgtggccgctgctgctgctgctgctgctgctgctggcgctgtgcggctgcccggcccccgccgcggcc

SEQ ID NO: 41 - DNA, 419 bp, Homo sapiens
gccccacagcctcgccgctcctgctatttgccaaccgccgggacgtacggctggtggacgccggcggagtcaagctggagtccaccatcgtggtcagcggcctggaggatgcggccgcagtggacttccagttttccaagggagccgtgtactggacagacgtgagcgaggaggccatcaagcagacctacctgaaccagacgggggccgccgtgcagaacgtggtcatctccggcctggtctctcccgacggcctcgcctgcgactgggtgggcaagaagctgtactggacggactcagagaccaaccgcatcgaggtggccaacctcaatggcacatcccggaaggtgctcttctggcaggaccttgaccagccgagggccatcgccttggaccccgctcacgggtaaaccctgctg

SEQ ID NO: 42 - DNA, 221 bp, Homo sapiens
ccccgtcacaggtacatgtactggacagactggggtgagacgccccggattgagcgggcagggatggatggcagcacccggaagatcattgtggactcggacatttactggcccaatggactgaccatcgacctggaggagcagaagctctactgggctgacgccaagctcagcttcatccaccgtgccaacctggacggctcgttccggtaggtacccac

SEQ ID NO: 43 - DNA, 221 bp, Homo sapiens
tccctgactgcaggcagaaggtggtggagggcagcctgacgcaccccttcgccctgacgctctccggggacactctgtactggacagactggcagacccgctccatccatgcctgcaacaagcgcactggggggaagaggaaggagatcctgagtgccctatactcacccatggacatccaggtgctgagccaggagcggcagcctttttgtgagtgccgg

SEQ ID NO: 44 - DNA, 156 bp, Homo sapiens
tttctcagtccacactcgctgtgaggaggacaatggcggctggtcccacctgtgcctgctgtccccaagcgagcctttttacacatgcgcctgccccacgggtgtgcagatgcaggacaacggcaggacgtgtaaggcaggtgaggcggtgggacg

SEQ ID NO: 45 - DNA, 416 bp, Homo sapiens
ctccacaggagccgaggaggtgctgctgctggcccggcggacggacctacggaggatctcgctggacacgccggacttcaccgacatcgtgctgcaggtggacgacatccggcacgccattgccatcgactacgacccgctagagggctatgtctactggacagatgacgaggtgcgggccatccgcagggcgtacctggacgggtctggggcgcagacgctggtcaacaccgagatcaacgaccccgatggcatcgcggtcgactgggtggcccgaaacctctactggaccgacacgggcacggaccgcatcgaggtgacgcgcctcaacggcacctcccgcaagatcctggtgtcggaggacctggacgagccccgagccatcgcactgcaccccgtgatggggtaagacgggc

SEQ ID NO: 46 - DNA, 198 bp, Homo sapiens
ttcttctccagcctcatgtactggacagactggggagagaaccctaaaatcgagtgtgccaacttggatgggcaggagcggcgtgtgctggtcaatgcctccctcgggtggcccaacggcctggccctggacctgcaggaggggaagctctactggggagacgccaagacagacaagatcgaggtgaggctcctgtgg

SEQ ID NO: 47 - DNA, 244 bp, Homo sapiens
ccgtcctgcaggtgatcaatgttgatgggacgaagaggcggaccctcctggaggacaagctcccgcacattttcgggttcacgctgctgggggacttcatctactggactgactggcagcgccgcagcatcgagcgggtgcacaaggtcaaggccagccgggacgtcatcattgaccagctgcccgacctgatggggctcaaagctgtgaatgtggccaaggtcgtcggtgagtccggggggtc

SEQ ID NO: 48 - DNA, 313 bp, Homo sapiens
gttcgcttccaggaaccaacccgtgtgcggacaggaacggggggtgcagccacctgtgcttctgcacaccccacgcaacccggtgtggctgccccatcggcctggagctgctgagtgacatgaagacctgcatcgtgcctgaggcctttttggtcttcaccagcagagccgccatccacaggatctccctcgagaccaataacaacgacgtggccatcccgctcacgggcgtcaaggaggcctcagccctggactttgatgtgtccaacaaccacatctactggacagacgtcagcctgaaggtagcgtgggc

SEQ ID NO: 49 - DNA, 255 bp, Homo sapiens
cctgctgccagaccatcagccgcgccttcatgaacgggagctcggtggagcacgtggtggagtttggccttgactaccccgagggcatggccgttgactggatgggcaagaacctctactgggccgacactgggaccaacagaatcgaagtggcgcggctggacgggcagttccggcaagtcctcgtgtggagggacttggacaacccgaggtcgctggccctggatcccaccaaggggtaagtgtttgcctgtc

SEQ ID NO: 50 - DNA, 210 bp, Homo sapiens
gtgccttccagctacatctactggaccgagtggggcggcaagccgaggatcgtgcgggccttcatggacgggaccaactgcatgacgctggtggacaaggtgggccgggccaacgacctcaccattgactacgctgaccagcgcctctactggaccgacctggacaccaacatgatcgagtcgtccaacatgctgggtgagggccgggct

SEQ ID NO: 51 - DNA, 352 bp, Homo sapiens
gtgttcatgcaggtcaggagcgggtcgtgattgccgacgatctcccgcacccgttcggtctgacgcagtacagcgattatatctactggacagactggaatctgcacagcattgagcgggccgacaagactagcggccggaaccgcaccctcatccagggccacctggacttcgtgatggacatcctggtgttccactcctcccgccaggatggcctcaatgactgtatgcacaacaacgggcagtgtgggcagctgtgccttgccatccccggcggccaccgctgcggctgcgcctcacactacaccctggaccccagcagccgcaactgcagccgtaagtgcctcatggt

SEQ ID NO: 52 - DNA, 225 bp, Homo sapiens
gcctcctctacgcccaccaccttcttgctgttcagccagaaatctgccatcagtcggatgatcccggacgaccagcacagcccggatctcatcctgcccctgcatggactgaggaacgtcaaagccatcgactatgacccactggacaagttcatctactgggtggatgggcgccagaacatcaagcgagccaaggacgacgggacccaggcaggtgccctgtgg

SEQ ID NO: 53 - DNA, 235 bp, Homo sapiens
ctttgtcttacagccctttgttttgacctctctgagccaaggccaaaacccagacaggcagccccacgacctcagcatcgacatctacagccggacactgttctggacgtgcgaggccaccaataccatcaacgtccacaggctgagcggggaagccatgggggtggtgctgcgtggggaccgcgacaagcccagggccatcgtcgtcaacgcggagcgagggtaggaggccaac

SEQ ID NO: 54 - DNA, 218 bp, Homo sapiens
ccaccctcccgcaggtacctgtacttcaccaacatgcaggaccgggcagccaagatcgaacgcgcagccctggacggcaccgagcgcgaggtcctcttcaccaccggcctcatccgccctgtggccctggtggtggacaacacactgggcaagctgttctgggtggacgcggacctgaagcgcattgagagctgtgacctgtcaggtacgcgccccgg

SEQ ID NO: 55 - DNA, 234 bp, Homo sapiens
ggctgcttgcaggggccaaccgcctgaccctggaggacgccaacatcgtgcagcctctgggcctgaccatccttggcaagcatctctactggatcgaccgccagcagcagatgatcgagcgtgtggagaagaccaccggggacaagcggactcgcatccagggccgtgtcgcccacctcactggcatccatgcagtggaggaagtcagcctggaggagttctgtacgtgggggc

SEQ ID NO: 56 - DNA, 157 bp, Homo sapiens
ttgtctttgcagcagcccacccatgtgcccgtgacaatggtggctgctcccacatctgtattgccaagggtgatgggacaccacggtgctcatgcccagtccacctcgtgctcctgcagaacctgctgacctgtggaggtaggtgtgacctaggtgc

SEQ ID NO: 57 - DNA, 272 bp, Homo sapiens
gttctcctctgtccctcccccagagccgcccacctgctccccggaccagtttgcatgtgccacaggggagatcgactgtatccccggggcctggcgctgtgacggctttcccgagtgcgatgaccagagcgacgaggagggctgccccgtgtgctccgccgcccagttcccctgcgcgcggggtcagtgtgtggacctgcgcctgcgctgcgacggcgaggcagactgtcaggaccgctcagacgaggtggactgtgacggtgaggccctcc

SEQ ID NO: 58 - DNA, 134 bp, Homo sapiens
tctccttgcagccatctgcctgcccaaccagttccggtgtgcgagcggccagtgtgtcctcatcaaacagcagtgcgactccttccccgactgtatcgacggctccgacgagctcatgtgtggtgagccagctt

SEQ ID NO: 59 - DNA, 274 bp, Homo sapiens
gtttgtctctggcagaaatcaccaagccgccctcagacgacagcccggcccacagcagtgccatcgggcccgtcattggcatcatcctctctctcttcgtcatgggtggtgtctattttgtgtgccagcgcgtggtgtgccagcgctatgcgggggccaacgggcccttcccgcacgagtatgtcagcgggaccccgcacgtgcccctcaatttcatagccccgggcggttcccagcatggccccttcacaggtaaggagcctgagatatggaa

SEQ ID NO: 60 - DNA, 164 bp, Homo sapiens
cttccctgccaggcatcgcatgcggaaagtccatgatgagctccgtgagcctgatggggggccggggcggggtgcccctctacgaccggaaccacgtcacaggggcctcgtccagcagctcgtccagcacgaaggccacgctgtacccgccggtgaggggcggg

SEQ ID NO: 61 - DNA, 130 bp, Homo sapiens
ttggctctcctcagatcctgaacccgccgccctccccggccacggacccctccctgtacaacatggacatgttctactcttcaaacattccggccactgcgagaccgtacaggtaggacatcccctgcag

SEQ ID NO: 62 - DNA, 496 bp, Homo sapiens
tcaaacattccggccactgcgagaccgtacaggccctacatcattcgaggaatggcgcccccgacgacgccctgcagcaccgacgtgtgtgacagcgactacagcgccagccgctggaaggccagcaagtactacctggatttgaactcggactcagacccctatccacccccacccacgccccacagccagtacctgtcggcggaggacagctgcccgccctcgcccgccaccgagaggagctacttccatctcttcccgccccctccgtccccctgcacggactcatcctgacctcggccgggccactctggcttctctgtgcccctgtaaatagttttaaatatgaacaaagaaaaaaatatattttatgatttaaaaaataaatataattgggattttaaaaacatgagaaatgtgaactgtgatggggtgggcagggctgggagaactttgtacagtggagaaatatttataaacttaattttgtaaaaca

SEQ ID NO: 63 - DNA, 3081 bp, Homo sapiens
cccgccagcccagcccagcccaaccctactccctccccacgccagggcagcagccgttgctcagagagaaggtggaggaagaaatccagaccctagcacgcgcgcaccatcatggaccattatgattctcagcaaaccaacgattacatgcagccagaagaggactgggaccgggacctgctcctggacccggcctgggagaagcagcagagaaagacattcacggcatggtgtaactcccacctccggaaggcggggacacagatcgagaacatcgaagaggacttccgggatggcctgaagctcatgctgctgctggaggtcatctcaggtgaacgcttggccaagccagagcgaggcaagatgagagtgcacaagatctccaacgtcaacaaggccctggatttcatagccagcaaaggcgtcaaactggtgtccatcggagccgaagaaatcgtggatgggaatgtgaagatgaccctgggcatgatctggaccatcatcctgcgctttgccatccaggacatctccgtggaagagacttcagccaaggaagggctgctcctgtggtgtcagagaaagacagccccttacaaaaatgtcaacatccagaacttccacataagctggaaggatggcctcggcttctgtgctttgatccaccgacaccggcccgagctgattgactacgggaagctgcggaaggatgatccactcacaaatctgaatacggcttttgacgtggcagagaagtacctggacatccccaagatgctggatgccgaagacatcgttggaactgcccgaccggatgagaaagccatcatgacttacgtgtctagcttctaccacgccttctctggagcccagaaggcggagacagcagccaatcgcatctgcaaggtgttggccgtcaaccaggagaacgagcagcttatggaagactacgagaagctggccagtgatctgttggagtggatccgccgcacaatcccgtggctggagaaccgggtgcccgagaacaccatgcatgccatgcaacagaagctggaggacttccgggactaccggcgcctgcacaagccgcccaaggtgcaggagaagtgccagctggagatcaacttcaacacgctgcagaccaagctgcggctcagcaaccggcctgccttcatgccctctgagggcaggatggtctcggacatcaacaatgcctggggctgcctggagcaggtggagaagggctatgaggagtggttgctgaatgagatccggaggctggagcgactggaccacctggcagagaagttccggcagaaggcctccatccacgaggcctggactgacggcaaagaggccatgctgcgacagaaggactatgagaccgccaccctctcggagatcaaggccttgctcaagaagcatgaggccttcgagagtgacctggctgcccaccaggaccgtgtggagcagattgccgccatcgcacaggagctcaatgagctggactattatgactcacccagtgtcaacgcccgttgccaaaagatctgtgaccagtgggacaatctgggggccctaactcagaagcgaagggaagctctggagcggaccgagaaactgctggagaccattgaccagctgtacttggagtatgccaagcgggctgcacccttcaacaactggatggagggggccatggaggacctgcaggacaccttcattgtgcacaccattgaggagatccagggactgaccacagcccatgagcagttcaaggccaccctccctgatgccgacaaggagcgcctggccatcctgggcatccacaatgaggtgtccaagattgtccagacctaccacgtcaatatggcgggcaccaacccctacacaaccatcacgcctcaggagatcaatggcaaatgggaccacgtgcggcagctggtgcctcggagggaccaagctctgacggaggagcatgcccgacagcagcacaatgagaggctacgcaagcagtttggagcccaggccaatgtcatcgggccctggatccagaccaagatggaggagatcgggaggatctccattgagatgcatgggaccctggaggaccagctcagccacctgcggcagtatgagaagagcatcgtcaactacaagccaaagattgatcagctggagggcgaccaccagctcatccaggaggcgctcatcttcgacaacaagcacaccaactacaccatggagcacatccgtgtgggctgggagcagctgctcaccaccatcgccaggaccatcaatgaggtagagaaccagatcctgacccgggatgccaagggcatcagccaggagcagatgaatgagttccgggcctccttcaaccactttgaccgggatcactccggcacactgggtcccgaggagttcaaagcctgcctcatcagcttgggttatgatattggcaacgacccccagggagaagcagaatttgcccgcatcatgagcattgtggaccccaaccgcctgggggtagtgacattccaggccttcattgacttcatgtcccgcgagacagccgacacagatacagcagaccaagtcatggcttccttcaagatcctggctggggacaagaactacattaccatggacgagctgcgccgcgagctgccacccgaccaggctgagtactgcatcgcgcggatggccccctacaccggccccgactccgtgccaggtgctctggactacatgtccttctccacggcgctgtacggcgagagtgacctctaatccaccccgcccggccgccctcgtcttgtgcgccgtgcccacagatgtgaaatgaatgtaatctaatagaagcctaatcagcccaccatgttctccactgaaaaatcctctttctttggggtttttctttctttcttttttgattttgcactggacggtgacgtcagcctgtacaggctcccaggggtggcgtcaaatgctattgaaattgcgctgaatcgtatgctttttccttttgataaataaacaatgtaaaaatgtttcaaaaacctaataaaataaataaatacg

SEQ ID NO: 64 - DNA, 1324 bp, Homo sapiens
  misc_feature (1)...(1324): n = A,T,C or G
ggccgcccggcgcccccagcagnccgagccggggcgcacagncggggcgcagcccgcgccccccgccgcgattgacatgatgtttccacaaagcaggcattcgggctcctcgcacctaccccagcaactcaaattcaccacctcggactcctgcgaccgcatcaaagacgaatttcagctactgcaagctcagtaccacagcctcaagctcgaatgtgacaagttggccagtgagaagtcagagatgcagcgtcactatgtgatgtactacgagatgtcctacggcttgaacatcgagatgcacaaacaggctgagatcgtcaaaaggctgaacgggatttgtgcccaggtcctgccctacctctcccaagagcaccagcagcaggtcttgggagccattgagagggccaagcaggtcaccgctcccgagctgaactctatcatccgacagcagctccaagcccaccagctgtcccagctgcaggccctggccctgcccttgaccccactacccgtggggctgcagccgccttcgctgccggcggtcagcgcaggcaccggcctcctctcgctgtccgcgctgggttcccaggcccacctctccaaggaagacaagaacgggcacgatggtgacacccaccaggaggatgatggcgagaagtcggattagcagggggccgggacagggaggttgggaggggggacagaggggagacagaggcacggagagaaaggaatgtttagcacaagacacagcggagctcgggattggctaatctcccatagtatttatggtggcgccggcggggccccagcccagcttgcaggccacctctagctttcttcctaccccattccggcttccctcctcctcccctgcagcctggttaggtggatacctgccctgacatgtgaggcaagctaaggcctggagggtcagatgggagaccaggtcccaagggagcaagacctgcgaagcgcagcagccccggcccttcccccgttttgaacatgtgtaaccgacagtctgccctgggccacagccctctcaccctggtactgcatgcacgcaatgctagctgcccctttcccgtcctgggcaccccgagtctcccccgaccccgggtcccaggtatgctcccacctccacctgccccactcaccacctctgctagttccagacacctccacgcccacctggtcctctcccatcgcccacaaaagggggggcacgagggacgagcttagctgagctgggaggagcagggtgagggtgggcgacccaggattccccctccccttcccaaataaagatgagggtact

SEQ ID NO: 65 - DNA, 2377 bp, Homo sapiens
ggtgacaaagagccaacagagacaataggagacttgtcaatttgtcttgatgggctacagttagagtctgaagttgttaccaatggtgaaactacatgttcagaaagtgcttctcagaatgatgatggctccagatccaaggatgaaacaagagtgagcacaaatggatcagatgaccctgaagatgcaggagctggtgaaaataggagagtcagtgggaataattctccatcactctcaaatggtggttttaaaccttctagacctccaagaccttcacgaccaccaccacccaccccacgtagaccagcatctgtcaatggttcaccatctgccacttctgaaagtgatgggtctagtacaggctctctgccgccgacaaatacaaatacaaatacatctgaaggagcaacatctggattaataattcctcttactatatctggaggctcaggccctaggccattaaatcctgtaactcaagctcccttgccacctggttgggagcagagagtggaccagcacgggcgagtttactatgtagatcatgttgagaaaagaacaacatgggatagaccagaacctctacctcctggctgggaacggcgggttgacaacatgggacgtatttattatgttgaccatttcacaagaacaacaacgtggcagaggccaacactggaatccgtccggaactatgaacaatggcagctacagcgtagtcagcttcaaggagcaatgcagcagtttaaccagagattcatttatgggaatcaagatttatttgctacatcacaaagtaaagaatttgatcctcttggtccattgccacctggatgggagaagagaacagacagcaatggcagagtatatttcgtcaaccacaacacacgaattacacaatgggaagaccccagaagtcaaggtcaattaaatgaaaagcccttacctgaaggttgggaaatgagattcacagtggatggaattccatattttgtggaccacaatagaagaactaccacctatatagatccccgcacaggaaaatctgccctagacaatggacctcagatagcctatgttcgggacttcaaagcaaaggttcagtatttccggttctggtgtcagcaactggccatgccacagcacataaagattacagtgacaagaaaaacattgtttgaggattcctttcaacagataatgagcttcagtccccaagatctgcgaagacgtttgtgggtgatttttccaggagaagaaggtttagattatggaggtgtagcaagagaatggttctttcttttgtcacatgaagtgttgaacccaatgtattgcctgtttgaatatgcagggaaggataactactgcttgcagataaaccccgcttcttacatcaatccagatcacctgaaatattttcgttttattggcagatttattgccatggctctgttccatgggaaattcatagacacgggtttttctttaccattctataagcgtatcttgaacaaaccagttggactcaaggatttagaatctattgatccagaattttacaattctctcatctgggttaaggaaaacaatattgaggaatgtgatttggaaatgtacttctccgttgacaaagaaattctaggtgaaattaagagtcatgatctgaaacctaatggtggcaatattcttgtaacagaagaaaataaagaggaatacatcagaatggtagctgagtggaggttgtctcgaggtgttgaagaacagacacaagctttctttgaaggctttaatgaaattcttccccagcaatatttgcaatactttgatgcaaaggaattagaggtccttttatgtggaatgcaagagattgatttgaatgactggcaaagacatgccatctaccgtcattatgcaaggaccagcaaacaaatcatgtggttttggcagtttgttaaagaaattgataatgagaagagaatgagacttctgcagtttgttactggaacctgccgattgccagtaggaggatttgctgatctcatggggagcaatggaccacagaaattctgcattgaaaaagttgggaaagaaaattggctacccagaagtcatacctgttttaatcgcctggacctgccaccatacaagagctatgagcaactgaaggaaaagctgttgtttgccatagaagaaacagaaggatttggacaagagtaacttctgagaacttgcaccatgaatgggcaagaacttatttgcaatgtttgtccttctctgcctgttgcacatcttgtaaaattggacaatggctctttagagagttatctgagtgtaagtaaattaatgttctcatttaaaaaaaaaaaaaaaaaaa

SEQ ID NO: 66 - DNA, 1295 bp, Homo sapiens
gggccgccgcccacccgggccttgcctctacctcagtcgttgccccccgattttcggctggagcccacggccccggccctcagcccccgctctagcttcgccagtagctcggccagcgacgcgagcaagccgtccagcccccggggcagcctgctgctggacggggcgggggctggcggagctggaggtagccggccctgcagcaatcgcaccagcggcatcagcatgggctacgaccagcgccacgggagccccttgccagcggggccgtgcctgtttggcccacccctggccggagcaccggcaggctattctcccggaggggtcccgtccgcctacccggagctccacgccgccctggaccgattgtacgctcagcggcccgcggggttcggctgccaggaaagccgccactcgtatcccccggccctgggcagccctggagctctagccggggcccgagtgggagcggcggggcccttggagagacggggggcgcaacccggacgacactctgtgaccggctacggggactgcgccgtgggcgcccggtaccaggacgagctaacagctttgcttcgcctgacggtgggcaccggtgggcgagaagccggagcccgcggagaaccctcggggattgagccgtcgggtctggaggagccaccaggtcctttcgttccggaggccgcccgggcccggatgcgggagccagaggccagggaggactacttcggcacctgtatcaagtgcaacaaaggcatctatgggcagagcaatgcctgccaggccctggacagcctctaccacacccagtgctttgtttgctgctcttgtgggcgaactttgcgttgcaaggctttctacagtgtcaatggctctgtgtactgtgaggaagattatctgttttcagggtttcaggaggcagctgagaaatgctgtgtctgtggtcacttgattttggagaagatcctacaagcaatggggaagtcctatcatccaggctgtttccgatgcattgtttgcaacaagtgcctggatggcatccccttcacagtggacttctccaaccaagtatactgtgtcaccgactaccacaaaaattatgctcctaagtgtgcagcctgtggccaacccatcctcccctctgagggctgtgaggacatcgtgagggtgatatccatggaccgggattatcactttgagtgctaccactgtgaggactgccggatgcagctgagtgatgaggaaggctgctgctgtttccctctggatgggcacttgctctgccatggttg

SEQ ID NO: 67 - DNA, 3411 bp, Homo sapiens
gggcccggggtcccgccaccaccgcgcgcgggacagattgattcactttggagctgtaagtactgatgtattagggtgcagcgctcattgttcattgacgcagagtcccaaaatgaatatccaagagcagggtttccccttggacctcggagcaagtttcaccgaagatgctccccgacccccagtgcctggtgaggagggagaactggtgtccacagacccgaggcccgccagctacagtttctgctccgggaaaggtgttggcattaaaggtgagacttcgacggccactccgaggcgctcggatctggacctggggtatgagcctgagggcagtgcctcccccaccccaccatacttgaagtgggctgagtcactgcattccctgctggatgaccaagatgggataagcctgttcaggactttcctgaagcaggagggctgtgccgacttgctggacttctggtttgcctgcactggcttcaggaagctggagccctgtgactcgaacgaggagaagaggctgaagctggcgagagccatctaccgaaagtacattcttgataacaatggcatcgtgtcccggcagaccaagccagccaccaagagcttcataaagggctgcatcatgaagcagctgatcgatcctgccatgtttgaccaggcccagaccgaaatccaggccactatggaggaaaacacctatccctccttccttaagtctgatatttatttggaatatacgaggacaggctcggagagccccaaagtctgtagtgaccagagctctgggtcagggacagggaagggcatatctggatacctgccgaccttaaatgaagatgaggaatggaagtgtgaccaggacatggacgaggacgatggcagagacgctgctccccccggaagactccctcagaagctgctcctggagacagctgccccgagggtctcctccagtagacggtacagcgaaggcagagagttcaggtatggatcctggcgggagccagtcaacccctattatgtcaatgccggctatgccctggccccagccaccagtgccaacgacagcgagcagcagagcctgtccagcgatgcagacaccctgtccctcacggacagcagcgtggatgggatccccccatacaggatccgtaagcagcaccgcagggagatgcaggagagcgcgcaggtcaatgggcgggtgcccctacctcacattccccgcacgtaccgggtgccgaaggaggtccgcgtggagcctcagaagttcgcggaggagctcatccaccgcctggaggctgtgcagcgcacgcgggaggccgaggagaagctggaggagcggctgaagcgcgtgcgcatggaggaggaaggtgaggacggcgatccatcgtcagggcccccagggccgtgtcacaagctgcctcccgcccccgcttggcaccacttcccgccccgcttgtgttggacatgggcttgtgccgggctccgggatgcacacgaggagaaccctgagagcatcctggacgagcacgtacagcgtgtgctgaggacaactggccgccagtcgcctgggcctggccatcgctccccggacagtgggcacgtggccaagatgccagtggcactggggggtgccgcctcggggcacgggaagcacgtacccaagtcaggggcgaagctggacgcggccggcctgcaccaccaccgacacgtccaccaccacgtccaccacagcacagcccggcccaaggagcaggtggaggccgaggccacccgcagggcccagagcagcttcgcctggggcctggaaccacacagccatggggcaaggtcccgaggctactcagagagtgttggcgctgcccccaacgccagtgatggcctcgcccacagtgggaaggtgggcgttgcgtgcaaaagaaatgccaagaaggctgagtcggggaagagcgccagcaccgaggtgccaggtgcctcggaggatgcggagaagaaccagaaaatcatgcagtggatcattgagggggaaaaggagatcagcaggcaccgcaggaccggccacgggtcttcggggacgaggaagccacagccccatgagaactccagaccyttgtcccttgagcacccctgggccggccctcagctccggacctccgtgcagccctcccacctcttcatccaagaccccaccatgccaccccacccagctcccaaccccctaacccagctggaggaggcgcgccgacgtctggaggaggaagaaaagagagccagccgagcaccctccaagcagaggtatgtgcaggaggttatgcggcggggacgcgcctgcgtcaggccagcgtgcgcgccggtgctgcacgtggtaccagccgtgtcggacatggagctctccgagacagagacaagatcgcagaggaaggtgggcggcgggagtgcccagccgtgtgacagcatcgttgtggcgtactacttctgcggggaacccatcccctaccgcaccctggtgaggggccgcgctgtcaccctgggccagttcaaggagctgctgaccaaaaagggcagctacagatactacttcaagaaagtgagcgacgagtttgactgtggggtggtgtttgaggaggttcgagaggacgaggccgtcctgcccgtctttgaggagaagatcatcggcaaagtggagaaggtggactgataggctggtgggctggccgctgtgccaggcgaggcccttggcgggcacgggtgtcacggccaggcagatgacctcgtactcaggagcccgatggggaacagtgttgggtgtaccacccatccctgtggtctacccgtgtctagaggcaggtagggggtccctccaagtggtccacaagcttctgtcctgcccccaaggaggcagcctggaccactcctcatagcaatacttggagggcccagcccaagtgaggcagccgaggtccctgctgccagcttcaggtgacccccccccatcccccggcacctcccttgggcacgtgtgctgggatctactttccctctgggatttgcccacgtacccaggtctggctggggcccaggcccggatgcagaggcctgcagggcctctgtcaattgtacgcgccaccaagtgccttcaacacagcttgtctcttgcctgccactgtgtgaatcggcgacggagcactgcacctgcctccagccgccggctgtgcagtcctgggtcctcctttctgagggcccgtgtaaatatgtacatttctcaggctagggccagcaggggctgcccgagtctgtttttcatgcgatgacacttgtacaattatcttttcaaaggtacttggataataatgaaataaaactgtttttgaacctgaataaaaaaaaaaaaaaaaaaaaaaaaaa

SEQ ID NO: 68 - DNA, 3140 bp, Homo sapiens
ggctgcgagtacctccatggtcccggtggctgtgacggcggcagtggcgcctgtcctgtccataaacagcgatttctcagatttgcgggaaattaaaaagcaactgctgcttattgcgggccttacccgggagcggggcctactacacagtagcaaatggtcggcggagttggctttctctctccctgcattgcctctggccgagctgcaaccgcctccgcctattacagaggaagatgcccaggatatggatgcctataccctggccaaggcctactttgacgttaaagagtatgatcgggcagcacatttcctgcatggctgcaatagcaagaaagcctattttctgtatatgtattccagatatctgtctggagaaaaaaagaaggacgatgaaacagttgatagcttaggccccctggaaaaaggacaagtgaaaaatgaggcgcttagagaattgagagtggagctcagcaaaaaacaccaagctcgagaacttgatggatttggactttatctgtatggtgtggtgcttcgaaaactggacttggttaaagaggccattgatgtgtttgtggaagctactcatgttttgcccttgcattggggagcctggttagaactctgtaacctgatcacagacaaagagatgctgaagttcctgtctttgccagacacctggatgaaagagttttttctggctcatatatacacagagttgcagttgatagaggaggccctgcaaaagtatcagaatctcattgatgtgggcttctctaagagctcgtatattgtttcccaaattgcagttgcctatcacaatatcagagatattgacaaagccctctccatttttaatgagctaaggaaacaagacccttacaggattgaaaatatggacacattctccaaccttctttatgtcaggagcatgaaatcggagttgagttatctggctcataacctctgtgagattgataaataccgtgtagaaacgtgctgtgtaattggcaattattacagtttacgttctcagcatgagaaagcagccttatatttccagagagccctgaaattaaatcctcggtatcttggtgcctggacactaatgggacatgagtacatggagatgaagaacacgtctgctgctatccaggcttatagacatgccattgaggtcaacaaacgggactacagagcttggtatggcctcgggcagacctatgaaatccttaagatgccattttactgcctttattattatagacgggcccaccagcttcgacccaatgattctcgcatgctggttgctttaggagaatgttacgagaaactcaatcaactagtggaagccaaaaagtgttattggagagcttacgccgtgggagatgtggagaaaatggctctggtgaaactggcaaagcttcatgaacagttgactgagtcagaacaggctgcccagtgttacatcaaatatatccaagatatctattcctgtggggaaatagtagaacacttggaggaaagcactgcctttcgctatctggcccagtactattttaagtgcaaactgtgggatgaagcttcaacttgtgcacaaaagtgttgtgcatttaatgatacccgggaagaaggtaaggccttactccggcaaatcctacagcttcggaaccaaggcgagactcctaccaccgaggtgcctgctccctttttcctacctgcttcactctctgctaacaatacccccacacgcagagtttctccactcaacttgtcttctgtcacgccatagttggctactctcaagccagcacattgttagacccatcttaattaagccttacctccatgtaaagaacagcacgtctgttccaaggacctcagctcttcttgtttctacagatggcaacagctccatagggacagcttgtataattaccttcagaggccaactgacagaatcctggcaggaacagacattatcttgccagttagaagtacttctgtctcacttatgtccaaagagtggctatagatcttggccttcttccctgaatgctttttttttttggcccccaagaaagtcccttttatagcactttagcacaggcaatgctacaggaacaaagtttcaatgctgctgagagtgaaagaaaggaggaaagtctgccactctaccctgagctggcagtagggcactgagtacccttaggaagaagtcagagcaatggatacaaatgaccttgctcttggatttgctgagcatgatccctattctgatgtcagagattaggtttaaatggaatagagctatccatttgttcttactctctagggagacaatcttccaaaacagttttgggggggtcttctaaagctttcaaattggaagtaactttattcaactagagttgaataaaagaagggcaaaaataatctcacagagcttggaactgctgatagcccttactgagggcaaaagatggctatattgttagctatactcctaccaaagcaagcaaggagataggattatagataatttcacggacatttggaaataacattggtgattatacagacaagaataaactcacttcaagctggtctgttttaataaattttcaacgtaattgtctatttttttccctcccatctgcaacagaatacatttttttcagcctttatctagatgaggtaaagggaatcattcttatggtgctcttggagagtttcaggcctgtgcatgtgtgtacagcaggaggtaatatgctataatgtctgctgtaatatatttgcacagtagatgctatggatcattctgagctcagggtccagactttattcttattcccagaattttgtgttacgtttttacctcctaacatatgacacttcatcttatattaaggaaggtttagaatatctaatacgacttgaattcatttgttactaagccttctcaggcaagctgtatactagttactggtctccactgccatgccttttcaaggttcccatggtccagaatgatgtttgattcttaatttttctgtcccttttataatttgttttaatgattttgctacatttggaattcaataaaaaatgtgaacaataataaaaaaaaaaaaaaaaaa

SEQ ID NO: 69 - DNA, 3513 bp, Homo sapiens
ccgtgtaccaggtgctgctagtgggaagcacgctgctgaaggaagtgccttccgggctgcagctggagcagttgccttctcagagcctgctgacccacatcccaacggcggggctgcccacttcgctaggaggaggcctgccttactgccaccaggcctggctggatttccgaaggcggctggaagctctactacagaactgccaggcagcttgtgccctgctccagggggccatcgaaagtgtgaaggctgtgccccagcccatggagcctggggaggtcggtcagctgctacagcagacagaggtcctgatgcagcaggtgctagactcgccatggctggcatggctacaatgccaggggggccgggagctgacatggctgaagcaagaggtcccagaggtgaccctgagcccagactacaggacggcaatggacaaggctgacgagctatatgaccgggtggatggattgctgcaccaactgaccctgcagagcaaccagcgaatacaggccctagagttggtccaaacactggaggcccgggaaagcggactgcaccagattgaagtgtggctgcagcaggtgggctggccagcactggaggaggctggggagccctcgctggacatgctgctccaggcccaaggctcttttcaggagctgtaccaggttgcccaggagcaggtcaggcaaggggagaagtttctgcagccgctgactggctgggaggcggctgaactggacccccctggggcacgctttctggccctgcgagcccagctgactgaattctctagggctttggcccagcggtgccagcggctggcggatgctgagaggctgtttcagctcttcagggaggccttgacgtgggctgaggaggggcagcgagtgttggcagagctggagcaggaacgcccgggggttgtgttgcagcagctgcagctgcactggaccaggcaccctgacttgcctcctgcccacttccgaaagatgtgggctctggccacggggctgggctcagaggccatccgccaggagtgccgctgggcctgggcgcggtgccaggacacctggctggccctggaccaaaagcttgaggcttcactgaagctaccaccggtgggcagcacagctagcctgtgtgtcagccaggtccccgctgcacctgcccaccctcccctgaggaaggcctacagcttcgatcggaatctggggcagagtctcagtgaacctgcctgccactgccaccatgcggccactattgctgcctgccgcagaccagaggctggaggaggtgccctgccccaggcatcccctactgtgcctccaccaggcagctctgaccccaggagcctcaacaggctacagctggtgctggcagagatggtggccacggagcgggagtatgtccgggctctagagtacactatggagaactatttccccgagctggatcgccccgatgtgccccagggcctccgcggtcagcgtgcccacctctttggcaacctggagaagctgcgggacttccactgccacttcttcctgcgtgagctggaggcttgcacccggcacccaccacgagtggcctatgccttcctgcgccatagggtgcagtttgggatgtacgcgctctacagcaagaataagcctcgctccgatgccctgatgtcaagctatgggcacaccttcttcaaggacaagcagcaagcactgggggaccacctggacctggcctcctacctgctaaagcccatccagcgcatgggcaagtacgcactgctgctgcaggagctggcacgggcctgcgggggccccacgcaggagctcagtgcgctgcgggaggcccagagccttgtgcacttccagctgcggcacggaaacgacctgctggccatggacgccatccagggctgtgatgttaacctcaaggaacaggggcagctggtgcgacaggatgagtttgtggtgcgcactgggcgccacaagtccgtgcgccgcatcttcctttttgaggagctgctgctcttcagcaagcctcgccatgggcccacaggggttgacacatttgcctacaagcgctccttcaagatggcagaccttggtctcactgagtgctgtgggaacagcaacctgcgcttcgagatctggttccgccgccgcaaggccagggacacctttgtgctgcaggcctccagcctggctatcaagcaggcctggacagctgacatctcccacctgctttggaggcaggccgtccacaacaaggaggtgcgcatggctgagatggtgtccatgggtgtggggaacaaggccttccgagacattgctcccagcgaggaagccatcaacgaccgcaccgtcaactatgtcctgaagtgccgagaagttcgctctcgggcgtccattgccgtagccccgtttgaccatgacagcctctacctgggggcctcgaactcccttcctggagaccctgcctcttgctctgttctggggtccctcaacctgcacctgtacagagacccagctcttctgggtctccgctgtcccctgtatcccagcttcctagaggaagcagcactggaggctgaggcagagctgggcggccagccctctttgactgctgaggactcagagatctcgtcccaatgcccatcagccagtggctccagtggctctgacagcagctgtgtgtcagggcaggccctgggtaggggcctggaggacttaccctgtgtctgagcccgggactggacgagcagtagatccagcagcctgcagctccaaggaacattgcctctctggatctgctgtgaccagggtgtggctgacacctgggctacctccaacctacatgtgcaacgctgttgactaccctttctgatgtgtgtggccattggactaactggcacggggcctctctagggaagtctggttgtagagcctgaataggctcctggccccatgaccccttctcctgtccccagctcccatcccagttgtgggttaagaataggctagagcagacattgggtgtttccatgctgtaggctggtgggggaccatgtgcctctaggcagtgactagggtgcccccacccctcaggaagaacacaggtgggctcctagcagctgatccccaatgcctggccttaaagccgagctcagttaccatagggacaggtccacctctactgggccctcatgcttgcctttcctggcccccaggcccagcccctttttactggggcagtttcgttattttgacttgatgccttttgaataactttcaatagaattgtctaaaattatcttactggttgttaggcctttggtgtctcagagaaggagtctaggtctttgatgtgtgatttaatcttttatttgtttataataaaaaatagactgatttgtaaaaaaaaaaaaaaaaaaaaaaaaaaaaaaaaaaaaaaaaaaaaaaaaaaaaaaaaaaaaaaaaaaaaaaaaaaaaaaaaaaaaaaaaaaaaaaa

SEQ ID NO: 70 - DNA, 3597 bp, Homo sapiens
catgccagttacttcctcaggaaaatattttcttgccttcttctttcagtatggttttaaatttgggaacagtggataacccaagtgtcccacaggccaaggtatattccaatggcagcatgatccctgcacccaaagccagcccctaaagcctaccccttgtgcacccgcagcctggtaagtgagcttggctgcttgtgaggagctacaagtgaaagagaagttattttaaataaatcccaaagtttgaggcagactgtccaggactgttcccaggaagaagcaggagttacccacaggaaaagtctctgacctggtcccctcaggcccagctacctgcgcccaccagcagtgaaggttgatgtactggcccagcatctccacctcccccatgcaaccaggtccctggtaccgtgtctcccgttgcatgtctggcttctgcctgtgctcctcctgccacgagcatcctccctgtccctcctcattccaccgtgtctctcctgcacacatagcctctgtcccagggcgatttatccacttgagtacaggagctgctcagacctctcagcccagccctctgtgactgccccagccccatcctaccccacccaaagctgccttcctggctgtaggagctccctcgtctagccaaggccctatgggtccccatccgaggatccacaagcaatgacttcccaaatgacctccactgcaagaagaatccttaccactgtttccagagccgtgaacgatgctgtgatggcccaggtctcagcaccaccctctgtgacctaaaaagaaaagctcaatttccatctgtcttctttcccaggaccaaggggacacagtaatgtgaagtcaaatacttaaccgagcaaagggccagtgttgttatcagtcaaggacaaacctcccacctcacagacagccaagcagtgagggaaagacagacagacataggtaggaaggtgctctgcaggcacaaggcccagagaagcccctctccgggaacttcccctgctccttccaggaacagtgagcccagtgagcagtcccagccagctcttcaaggccttcaaggggtctttccatgactgagtcacctccaggagctcacctgacccccagagaagacctaccccaggcagctccgtgccctggcttctccccatgccccaaatcccccccagccatccctcctggtcctcgtctacatcaagggcctcttcccctcttcctcccagctctcaggacaggtgactgggagaccttgaaccctcagcctcttcctttaaaaaaaacaaaacaaaacaaaactgtgggccatttatttgggattttggagttgtttggtttttgtttttatatcttaatagttcgaaagtaagaagggagccctgctatggatgttaagtccaaattactcggttagtgggagcaaaacctatgacttccaaggggatgaggagaggttcagaggacaggaggagcctcccccattgaaaaaaaaaaaatgggtcaggacattccctggatgaggacaatgctaggggtggcatctcacatggctgctgctattcctggtgcttccccacacttttgacagatggagtccttctcctaccgcctcctgccacctcaccctacaggcattctctatgtaggaaacaagagccttatcttatagagtggggagctgagacacagcctcaggtaacactgacacagctcccgaatgaggctgggacactctgcaaacctctcctcatggtgctaagggtggcatgctcttgacaggaaacctaaatgaccactcctctcatttggaaagtaatccactgcagtaaaagtttcagacatgcaagagagagtttttttttttttttactacaaatttttgctcccccataaaattatttttttattagagggagtatccaagttttaaaagtatatagaattttttggttgtaagagaaatacatactcattaggatcccgattaaattccttgagtagactggtgcctaccagaaagcaaagcaaagttaaacaaaacgaaacaaaatccttcatatacaaaaagaactttctgtttgtattggcagaggtagtgaggtgattcaggtaggctgaaaatcctgggttgcgggagcctcactttattccattcccacccgctttgatgtctatgcttggctctctgggctgcccctggtactgccgaatcctacacatctcttatcagctttcctcaaactttaaggaggctctgtgagggatgggtcatgggaagacccaagctttccctccgccaggattgcaaaagcaagtagacttggtctatgcagctcttcttccaacaatttctttatttggaattagaacttcctttgttagtatctttgatcttttgactcaagcacattttggaagggctcccttacaaaagtagaatttaaaacagaggatacagttaaagagcaacccaaaggacgcttaagaaaccgagaccacttcaccgaacaggactaaggaacactttcgtgcacagaagtcagccgcaatccaggcacaggacgaagatgggatacacgtgctcatctgtctgtcctcctttcctctccctccccgacgttctagttagcttgttgacttgttaaaccttctgttcttaaaatgaaaagctagcttacctcaaagaatcttgtttccattcggaaaccaacgattttgtgttttagaatggacagccctcccctcaccactccctaccttggcctggtgtccttgagacatacggtctttgcttagtcgtgtgttggctgctttgagcaggaacgaggcctccaggccctgaggtgggaaggaaggattggatgccactgccctcctccccactttagcatgtaggggccagcccatctcttccagcagggtcctgctgagttaccatagcaaccagcaactccagggtaccacaacagacaatggctcagcgagccgacgtgtggggatgatgcaggggttttggcccagccagaggacccagagttgagcttcaaatgctagagaaggggagaaacaggatggaagggtggtttaaggaactggcaggggtctttgagtcacatagagaagccgttgaaggaggtagggcaggttatctctgttccagtcacccccttccagccccatcccacttctgtttcaaactaaagctcccacctcgaacattgaccctttgttagaacaaagcaaagcatatctttaaacaacagtgttaaaatgagcctcaaatgtatgtggatgagatctctaagaagagggtcttctggttttgatttttaaagaagagtatcctagtaaaatattaaaaaaaaattaaaaagtttttaaaaaggaaacctatgctatttaaattggagcccagttgtaacttggtaaaggcaagcttctgtacctttgttataattaattgtatacctgtgtatgtaaatataaggcattcctattttgcagttcagaacaaaaaaaacttatttgtaatatagaataaagtttattaaaaaataagaaaaaaaaaaaaaaaaaaaa

SEQ ID NO: 71 - DNA, 855 bp, Homo sapiens
cgctcaattatctactcgagtctagactcgaggcggccgcccattgtgcactaaagcaggggatagcaacggcgtccctcctccccgctcagctgcagcccgcagtcctcacagtggtaacatgccacgtggtagtctctgtccatggacaccacacggatggttgtctcgcagccctgtgcagggaggataggacgggcacaggaggcgcattttggtgcaaaaaccgtgtgatagtctcgcacgcagtagatgttgttctccacgtccacggtgaagggaaccccgtccaggcactcattgcacacggagcaccggaagcagcctgggtggtaggacttgcccagggcctgcaggatcatttccatgatgagatgtccacacacgctgcatttgtcggccgtctgctggaacccggagtacaggaagtcctcctggcagtacactttctcacccacgttgtagaacgccttcccacggagtcgtctcccacacgagtcgcaggtgaagcagtcagtgtgataaagactccccattgcctggcacgcctgctgggctccgtagatgccaagcccacacttgatgcaaatgccgaagtagtcccgcgccgtgcgcgcctcgagcgcccgctccagctcccgggtgagcgcctccagccgccgctcggccgcgcttgggccgccctcccggccagggggcagcgggagtgcaggcagcgggaagggggccggccccgcaggctccggggagcgagcgggcgcggggcaggcgccgggcgggaggaagtcagcgtaggctttagtgcacaatgggaattcggatccggtcgacactagttctaggatctcttttttt

SEQ ID NO: 72 - DNA, 3791 bp, Homo sapiens
acagacggcgggtgaacatggcgtcctcgacttggtctgagacgtgataggcctgccttctggttgaagatgtggcgagtgaaaaaactgagcctcagcctgtcgccttcgccccagacgggaaaaccatctatgagaactcctctccgtgaacttaccctgcagcccggtgccctcaccacctctggaaaaagatcccccgcttgctcctcgctgaccccatcactgtgcaagctggggctgcaggaaggcagcaacaactcgtctccagtggattttgtaaataacaagaggacagacttatcttcagaacatttcagtcattcctcaaagtggctagaaacttgtcagcatgaatcagatgagcagcctctagatccaattccccaaattagctctactcctaaaacgtctgaggaagcagtagacccactgggcaattatatggttaaaaccatcgtccttgtaccatctccactggggcagcaacaagacatgatatttgaggcccgtttagataccatggcagagacaaacagcatatctttaaatggacctttgagaacagacgatctggtgagagaggaggtggcaccctgcatgggagacaggttttcagaagttgctgctgtatctgagaaacctatctttcaggaatctccgtcccatctcttagaggagtctccaccaaatccctgttctgaacaactacattgctccaaggaaagcctgagcagtagaactgaggctgtgcgtgaggacttagtaccttctgaaagtaacgccttcttgccttcctctgttctctggctttccccttcaactgccttggcagcagatttccgtgtcaatcatgtggacccagaggaggaaattgtagagcatggagctatggaggaaagagaaatgaggtttcccacacatcctaaggagtctgaaacagaagatcaagcacttgtctcaagtgtggaagatattctgtccacatgcctgacaccaaatctagtagaaatggaatcccaagaagctccaggcccagcagtagaagatgttggtaggattcttggctctgatacagagtcttggatgtccccactggcctggctggaaaaaggtgtaaatacctccgtcatgctggaaaatctccgccaaagcttatcccttccctcgatgcttcgggatgctgcaattggcactacccctttctctacttgctcggtggggacttggtttactccttcagcaccacaggaaaagagtacaaacacatcccagacaggcctggttggcaccaagcacagtacttctgagacagagcagctcctgtgtggccggcctccagatctgactgccttgtctcgacatgacttggaagataacctgctgagctctcttgtcattgtggagtttctctcccgccagcttcgggactggaagagccagctggctgtccctcacccagaaacccaggacagtagcacacagactgacacatctcacagtgggataactaataaacttcagcatcttaaggagagccatgagatgggacaggccctacagcaggccagaaatgtcatgcaatcatgggtgcttatctctaaagagctgatatccttgcttcacctatccctgttgcatttagaagaagataagactactgtgaatcaggagtctcggcgtgcagaaacattggtctgttgctgttttgatttgctgaagaaattgagggcaaagctccagagcctcaaagcagaaagggaggaggcaaggcacagagaggaaatggctctcagaggcaaggatgcggcagagatagtgttggaggctttctgtgcacacgccagccagcgcatcagccagctggaacaggacctagcatccatgcgggaattcagaggccttctgaaggatgcccagacccaactggtagggcttcatgccaagcaagaagagctggttcagcagacagtgagtcttacttctaccttgcaacaagactggaggtccatgcaactggattatacaacatggacagctttgctgagtcggtcccgacaactcacagagaaactcacagtcaagagccagcaagccctgcaggaacgtgatgtggcaattgaggaaaagcaggaggtttctagggtgctggaacaagtctctgcccagttagaggagtgcaaaggccaaacagaacaactggagttggaaaacattcgtctagcaacagatctccgggctcagttgcagattctggccaacatggacagccagctaaaagagctacagagtcagcatacccattgtgcccaggacctggctatgaaggatgagttactctgccagcttacccagagcaatgaggagcaggctgctcaatgcgtaaaggaagagatggcactaaaacacatgcaggcagaactgcagcagcaacaagctgtcctggccaaagaggtgcgggacctgaaagagaccttggagtttgcagaccaggagaatcaggttgctcacctggagctgggtcaggttgagtgtcaattgaaaaccacactggaagtgctccgggagcgcagcttgcagtgtgagaacctcaaggacactgtagagaacctaacggctaaactggccagcaccatagcagataaccaggagcaagatctggagaaaacacggcagtactctcaaaagctagggctgctgactgagcaactacagagcctgactctctttctacagacaaaactaaaggagaagactgaacaagagacccttctgctgagtacagcctgtcctcccacccaggaacaccctctgcctaatgacaggaccttcctgggaagcatcttgacagcagtggcagatgaagagccagaatcaactcctgtgcccttgcttggaagtgacaagagtgctttcacccgagtagcatcaatggtttcccttcagcccgcagagaccccaggcatggaggagagcctggcagaaatgagtattatgactactgagcttcagagtctttgttccctgctacaagagtctaaagaagaagccatcaggactctgcagcgaaaaatttgtgagctgcaagctaggctgcaggcccaggaagaacagcatcaggaagtccagaaggcaaaagaagcagacatagagaagctgaaccaggccttgtgcttgcgctacaagaatgaaaaggagctccaggaagtgatacagcagaatgagaagatcctagaacagatagacaagagtggcgagctcataagccttagagaggaggtgacccaccttacccgctcacttcggcgtgcggagacagagaccaaagtgctccaggaggcctggcaggccagctggactccaactgccagcctatggccaccaattggatccaggagaaagtgtggctctctcaggaggtggacaaactgagagtgatgttcctggagatgaaaaatgagaaggaaaactcctgatcaagttccagagcccatagaaatatcctagaggagaaccttcggcgctctgacaaggagttagaaaaactagatgacattgttcagcatatttataagaccctgctctctattccagaggtggtgaggggatgcaaagaactacagggattgctggaatttctgagctaagaaactgaaagccagaatttgtttcacctctttttacctgcaatacccccttaccccaataccaagaccaactggcatagagccaactgagataaatgctatttaaataaagtgtatttaatgaaaaaaaaaaaaaaaaaaaaa

SEQ ID NO: 73 - DNA, 1683 bp, Homo sapiens
ctctgagtgtccagtggtcagttgccccaggatggggaccacagccagagcagccttggtcttgacctatttggctgttgcttctgctgcctctgagggaggcttcacggctacaggacagaggcagctgaggccagagcactttcaagaagttggctacgcagctcccccctccccacccctatcccgaagcctccccatggatcaccctgactcctctcagcatggccctccctttgagggacagagtcaagtgcagccccctccctctcaggaggccacccctctccaacaggaaaagctgctacctgcccaactccctgctgaaaaggaagtgggtccccctctccctcaggaagctgtccccctccaaaaagagctgccctctctccagcaccccaatgaacagaaggaaggaacgccagctccatttggggaccagagccatccagaacctgagtcctggaatgcagcccagcactgccaacaggaccggtcccaagggggctggggccaccggctggatggcttcccccctgggcggccttctccagacaatctgaaccaaatctgccttcctaaccgtcagcatgtggtatatggtccctggaacctaccacagtccagctactcccacctcactcgccagggtgagaccctcaatttcctggagattggatattcccgctgctgccactgccgcagccacacaaaccgcctagagtgtgccaaacttgtgtgggaggaagcaatgagccgattctgtgaggccgagttctcggtcaagacccgaccccactggtgctgcacgcggcagggggaggctcggttctcctgcttccaggaggaagctccccagccacactaccagctccgggcctgccccagccatcagcctgatatttcctcgggtcttgagctgcctttccctcctggggtgcccacattggacaatatcaagaacatctgccacctgaggcgcttccgctctgtgccacgcaacctgccagctactgaccccctacaaagggagctgctggcactgatccagctggagagggagttccagcgctgctgccgccaggggaacaatcacacctgtacatggaaggcctgggaggatacccttgacaaatactgtgaccgggagtatgctgtgaagacccaccaccacttgtgttgccgccaccctcccagccctactcgggatgagtgctttgcccgtcgggctccttaccccaactatgaccgggacatcttgaccattgacatcagtcgagtcacccccaacctcatgggccacctctgtggaaaccaaagagttctcaccaagcataaacatattcctgggctgatccacaacatgactgcccgctgctgtgacctgccatttccagaacaggcctgctgtgcagaggaggagaaattaaccttcatcaatgatctgtgtggtccccgacgtaacatctggcgagaccctgccctctgctgttacctgagtcctggggatgaacaggtcaactgcttcaacatcaattatctgaggaacgtggctctagtgtctggagacactgagaacgccaagggccagggggagcagggctcaactggaggaacaaatatcagctccacctctgagcccaaggaagaatgagtcaccccagagccctagagggtcagatg

SEQ ID NO: 74 - DNA, 1696 bp, Homo sapiens
cacctaaaagccaaaatgggaaaggaaaagactcatatcaacattgtcgtcattggacacgtagattcgggcaagtccaccactactggccatctgatctataaatgcggtggcatcgacaaaagaaccattgaaaaatttgagaaggaggctgctgagatgggaaagggctccttcaagtatgcctgggtcttggataaactgaaagctgagcgtgaacgtggtatcaccattgatatctccttgtggaaatttgagaccagcaagtactatgtgactatcattgatgccccaggacacagagactttatcaaaaacatgattacagggacatctcaggctgactgtgctgtcctgattgttgctgctggtgttggtgaatttgaagctggtatctccaagaatgggcagacccgagagcatgcccttctggcttacacactgggtgtgaaacaactaattgtcggtgttaacaaaatggattccactgagccaccctacagccagaagagatatgaggaaattgttaaggaagtcagcacttacattaagaaaattggctacaaccccgacacagtagcatttgtgccaatttctggttggaatggtgacaacatgctggagccaagtgctaacatgccttggttcaagggatggaaagtcacccgtaaggatggcaatgccagtggaaccacgctgcttgaggctgtggactgcatcctaccaccaactcgtccaactgacaagcccttgcgcctgcctctccaggatgtctacaaaattggtggtattggtactgttcctgttggccgagtggagactggtgttctcaaacccggtatggtggtcacctttgctccagtcaacgttacaacggaagtaaaatctgtcgaaatgcaccatgaagctttgagtgaagctcttcctggggacaatgtgggcttcaatgtcaagaatgtgtctgtcaaggatgttcgtcgtggcaacgttgctggtgacagcaaaaatgacccaccaatggaagcagctggcttcactgctcaggtgattatcctgaaccatccaggccaaataagcgccggctatgcccctgtattggattgccacacggctcacattgcatgcaagtttgctgagctgaaggaaaagattgatcgccgttctggtaaaaagctggaagatggccctaaattcttgaagtctggtgatgctgccattgttgatatggttcctggcaagcccatgtgtgttgagagcttctcagactatccacctttgggtcgctttgctgttcgtgatatgagacagacagttgcggtgggtgtcatcaaagcagtggacaagaaggctgctggagctggcaaggtcaccaagtctgcccagaaagctcagaaggctaaatgaatattatccctaatacctgccaccccactcttaatcagtggtggaagaacggtctcagaactgtttgtttcaattggccatttaagtttagtagtaaaagactggttaatgataacaatgcatcgtaaaaccttcagaaggaaaggagaatgttttgtggaccactttggttttcttttttgcgtgtggcagttttaagttattagtttttaaaatcagtactttttaatggaaacaacttgaccaaaaatttgtcacagaattttgagacccattaaaaaagttaaatgag

SEQ ID NO: 75 - DNA, 7680 bp, Homo sapiens
gaagagcaagaggcaggctcagcaaatggttcagccccagtccccggtggctgtcagtcaaagcaagcccggttgttatgacaatggaaaacactatcagataaatcaacagtgggagcggacctacctaggtaatgtgttggtttgtacttgttatggaggaagccgaggttttaactgcgaaagtaaacctgaagctgaagagacttgctttgacaagtacactgggaacacttaccgagtgggtgacacttatgagcgtcctaaagactccatgatctgggactgtacctgcatcggggctgggcgagggagaataagctgtaccatcgcaaaccgctgccatgaagggggtcagtcctacaagattggtgacacctggaggagaccacatgagactggtggttacatgttagagtgtgtgtgtcttggtaatggaaaaggagaatggacctgcaagcccatagctgagaagtgttttgatcatgctgctgggacttcctatgtggtcggagaaacgtgggagaagccctaccaaggctggatgatggtagattgtacttgcctgggagaaggcagcggacgcatcacttgcacttctagaaatagatgcaacgatcaggacacaaggacatcctatagaattggagacacctggagcaagaaggataatcgaggaaacctgctccagtgcatctgcacaggcaacggccgaggagagtggaagtgtgagaggcacacctctgtgcagaccacatcgagcggatctggccccttcaccgatgttcgtgcagctgtttaccaaccgcagcctcacccccagcctcctccctatggccactgtgtcacagacagtggtgtggtctactctgtggggatgcagtggttgaagacacaaggaaataagcaaatgctttgcacgtgcctgggcaacggagtcagctgccaagagacagctgtaacccagacttacggtggcaacttaaatggagagccatgtgtcttaccattcacctacaatggcaggacgttctactcctgcaccacggaagggcgacaggacggacatctttggtgcagcacaacttcgaattatgagcaggaccagaaatactctttctgcacagaccacactgttttggttcagactcaaggaggaaattccaatggtgccttgtgccacttccccttcctatacaacaaccacaattacactgattgcacttctgagggcagaagagacaacatgaagtggtgtgggaccacacagaactatgatgccgaccagaagtttgggttctgccccatggctgcccacgaggaaatctgcacaaccaatgaaggggtcatgtaccgcattggagatcagtgggataagcagcatgacatgggtcacatgatgaggtgcacgtgtgttgggaatggtcgtggggaatggacatgcattgcctactcgcaacttcgagatcagtgcattgttgatgacatcacttacaatgtgaacgacacattccacaagcgtcatgaagaggggcacatgctgaactgtacatgcttcggtcagggtcggggcaggtggaagtgtgatcccgtcgaccaatgccaggattcagagactgggacgttttatcaaattggagattcatgggagaagtatgtgcatggtgtcagataccagtgctactgctatggccgtggcattggggagtggcattgccaacctttacagacctatccaagctcaagtggtcctgtcgaagtatttatcactgagactccgagtcagcccaactcccaccccatccagtggaatgcaccacagccatctcacatttccaagtacattctcaggtggagacctaaaaattctgtaggccgttggaaggaagctaccataccaggccacttaaactcctacaccatcaaaggcctgaagcctggtgtggtatacgagggccagctcatcagcatccagcagtacggccaccaagaagtgactcgctttgacttcaccaccaccagcaccagcacacctgtgaccagcaacaccgtgacaggagagacgactcccttttctcctcttgtggccacttctgaatctgtgaccgaaatcacagccagtagctttgtggtctcctgggtctcagcttccgacaccgtgtcgggattccgggtggaatatgagctgagtgaggagggagatgagccacagtacctggatcttccaagcacagccacttctgtgaacatccctgacctgcttcctggccgaaaatacattgtaaatgtctatcagatatctgaggatggggagcagagtttgatcctgtctacttcacaaacaacagcgcctgatgcccctcctgacccgactgtggaccaagttgatgacacctcaattgttgttcgctggagcagaccccaggctcccatcacagggtacagaatagtctattcgccatcagtagaaggtagcagcacagaactcaaccttcctgaaactgcaaactccgtcaccctcagtgacttgcaacctggtgttcagtataacatcactatctatgctgtggaagaaaatcaagaaagtacacctgttgtcattcaacaagaaaccactggcaccccacgctcagatacagtgccctctcccagggacctgcagtttgtggaagtgacagacgtgaaggtcaccatcatgtggacaccgcctgagagtgcagtgaccggctaccgtgtggatgtgatccccgtcaacctgcctggcgagcacgggcagaggctgcccatcagcaggaacacctttgcagaagtcaccgggctgtcccctggggtcacctattacttcaaagtctttgcagtgagccatgggagggagagcaagcctctgactgctcaacagacaaccaaactggatgctcccactaacctccagtttgtcaatgaaactgattctactgtcctggtgagatggactccacctcgggcccagataacaggataccgactgaccgtgggccttacccgaagaggccagcccaggcagtacaatgtgggtccctctgtctccaagtaccccctgaggaatctgcagcctgcatctgagtacaccgtatccctcgtggccataaagggcaaccaagagagccccaaagccactggagtctttaccacactgcagcctgggagctctattccaccttacaacaccgaggtgactgagaccaccatcgtgatcacatggacgcctgctccaagaattggttttaagctgggtgtacgaccaagccagggaggagaggcaccacgagaagtgacttcagactcaggaagcatcgttgtgtccggcttgactccaggagtagaatacgtctacaccatccaagtcctgagagatggacaggaaagagatgcgccaattgtaaacaaagtggtgacaccattgtctccaccaacaaacttgcatctggaggcaaaccctgacactggagtgctcacagtctcctgggagaggagcaccaccccagacattactggttatagaattaccacaacccctacaaacggccagcagggaaattctttggaagaagtggtccatgctgatcagagctcctgcacttttgataacctgagtcccggcctggagtacaatgtcagtgtttacactgtcaaggatgacaaggaaagtgtccctatctctgataccatcatcccagctgttcctcctcccactgacctgcgattcaccaacattggtccagacaccatgcgtgtcacctgggctccacccccatccattgatttaaccaacttcctggtgcgttactcacctgtgaaaaatgaggaagatgttgcagagttgtcaatttctccttcagacaatgcagtggtcttaacaaatctcctgcctggtacagaatatgtagtgagtgtctccagtgtctacgaacaacatgagagcacacctcttagaggaagacagaaaacaggtcttgattccccaactggcattgacttttctgatattactgccaactcttttactgtgcactggattgctcctcgagccaccatcactggctacaggatccgccatcatcccgagcacttcagtgggagacctcgagaagatcgggtgccccactctcggaattccatcaccctcaccaacctcactccaggcacagagtatgtggtcagcatcgttgctcttaatggcagagaggaaagtcccttattgattggccaacaatcaacagtttctgatgttccgagggacctggaagttgttgctgcgacccccaccagcctactgatcagctgggatgctcctgctgtcacagtgagatattacaggatcacttacggagaaacaggaggaaatagccctgtccaggagttcactgtgcctgggagcaagtctacagctaccatcagcggccttaaacctggagttgattataccatcactgtgtatgctgtcactggccgtggagacagccccgcaagcagcaagccaatttccattaattaccgaacagaaattgacaaaccatcccagatgcaagtgaccgatgttcaggacaacagcattagtgtcaagtggctgccttcaagttcccctgttactggttacagagtaaccaccactcccaaaaatggaccaggaccaacaaaaactaaaactgcaggtccagatcaaacagaaatgactattgaaggcttgcagcccacagtggagtatgtggttagtgtctatgctcagaatccaagcggagagagtcagcctctggttcagactgcagtaaccaacattgatcgccctaaaggactggcattcactgatgtggatgtcgattccatcaaaattgcttgggaaagcccacaggggcaagtttccaggtacagggtgacctactcgagccctgaggatggaatccatgagctattccctgcacctgatggtgaagaagacactgcagagctgcaaggcctcagaccgggttctgagtacacagtcagtgtggttgccttgcacgatgatatggagagccagcccctgattggaacccagtccacagctattcctgcaccaactgacctgaagttcactcaggtcacacccacaagcctgagcgcccagtggacaccacccaatgttcagctcactggatatcgagtgcgggtgacccccaaggagaagaccggaccaatgaaagaaatcaaccttgctcctgacagctcatccgtggttgtatcaggacttatggtggccaccaaatatgaagtgagtgtctatgctcttaaggacactttgacaagcagaccagctcagggtgttgtcaccactctggagaatgtcagcccaccaagaagggctcgtgtgacagatgctactgagaccaccatcaccattagctggagaaccaagactgagacgatcactggcttccaagttgatgccgttccagccaatggccagactccaatccagagaaccatcaagccagatgtcagaagctacaccatcacaggtttacaaccaggcactgactacaagatctacctgtacaccttgaatgacaatgctcggagctcccctgtggtcatcgacgcctccactgccattgatgcaccatccaacctgcgtttcctggccaccacacccaattccttgctggtatcatggcagccgccacgtgccaggattaccggctacatcatcaagtatgagaagcctgggtctcctcccagagaagtggtccctcggccccgccctggtgtcacagaggctactattactggcctggaaccgggaaccgaatatacaatttatgtcattgccctgaagaataatcagaagagcgagcccctgattggaaggaaaaagacagacgagcttccccaactggtaacccttccacaccccaatcttcatggaccagagatcttggatgttccttccacagttcaaaagacccctttcgtcacccaccctgggtatgacactggaaatggtattcagcttcctggcacttctggtcagcaacccagtgttgggcaacaaatgatctttgaggaacatggttttaggcggaccacaccgcccacaacggccacccccataaggcataggccaagaccatacccgccgaatgtaggacaagaagctctctctcagacaaccatctcatgggccccattccaggacacttctgagtacatcatttcatgtcatcctgttggcactgatgaagaacccttacagttcagggttcctggaacttctaccagtgccactctgacaggcctcaccagaggtgccacctacaacatcatagtggaggcactgaaagaccagcagaggcataaggttcgggaagaggttgttaccgtgggcaactctgtcaacgaaggcttgaaccaacctacggatgactcgtgctttgacccctacacagtttcccattatgccgttggagatgagtgggaacgaatgtctgaatcaggctttaaactgttgtgccagtgcttaggctttggaagtggtcatttcagatgtgattcatctagatggtgccatgacaatggtgtgaactacaagattggagagaagtgggaccgtcagggagaaaatggccagatgatgagctgcacatgtcttgggaacggaaaaggagaattcaagtgtgaccctcatgaggcaacgtgttacgatgatgggaagacataccacgtaggagaacagtggcagaaggaatatctcggtgccatttgctcctgcacatgctttggaggccagcggggctggcgctgtgacaactgccgcagacctgggggtgaacccagtcccgaaggcactactggccagtcctacaaccagtattctcagagataccatcagagaacaaacactaatgttaattgcccaattgagtgcttcatgcctttagatgtacaggctgacagagaagattcccgagagtaaatcatctttccaatccagaggaacaagcatgtctctctgccaagatccatctaaactggagtgatgttagcagacccagcttagagttcttctttctttcttaagccctttgctctggaggaagttctccagcttcagctcaactcacagcttctccaagcatcaccctgggagtttcctgagggttttctcataaatgagggctgcacattgcctgttctgcttcgaagtattcaataccgctcagtattttaaatgaagtgattctaagatttggtttgggatcaataggaaagcatatgcagccaaccaagatgcaaatgttttgaaatgatatgaccaaaattttaagtaggaaagtcacccaaacacttctgctttcacttaagtgtctggcccgcaatactgtaggaacaagcatgatcttgttactgtgatattttaaatatccacagtactcactttttccaaatgatcctagtaattgcctagaaatatctttctcttacctgttatttatcaatttttcccagtatttttatacggaaaaaattgtattgaaaacacttagtatgcagttgataagaggaatttggtataattatggtgggtgattattttttatactgtatgtgccaaagctttactactgtggaaagacaactgttttaataaaagatttacattccaca

SEQ ID NO: 76 - DNA, 1316 bp, Homo sapiens
tcctaatacgactcactatagggctcgagcggccgcccgggcaggtcgaatgcaggcgacttgcgagctgggagcgatttaaaacgctttggattcccccggcctgggtggggagagcgagctgggtgccccctagattccccgcccccgcacctcatgagccgaccctcggctccatggagcccggcaattatgccaccttggatggagccaaggatatcgaaggcttgctgggagcgggaggggggcggaatctggtcgcccactcccctctgaccagccacccagcggcgcctacgctgatgcctgctgtcaactatgcccccttggatctgccaggctcggcggagccgccaaagcaatgccacccatgccctggggtgccccaggggacgtccccagctcccgtgccttatggttactttggaggcgggtactactcctgccgagtgtcccggagctcgctgaaaccctgtgcccaggcagccaccctggccgcgtaccccgcggagactcccacggccggggaagagtaccccagtcgccccactgagtttgccttctatccgggatatccgggaacctaccacgctatggccagttacctggacgtgtctgtggtgcagactctgggtgctcctggagaaccgcgacatgactccctgttgcctgtggacagttaccagtcttgggctctcgctggtggctggaacagccagatgtgttgccagggagaacagaacccaccaggtcccttttggaaggcagcatttgcagactccagcgggcagcaccctcctgacgcctgcgcctttcgtcgcggccgcaagaaacgcattccgtacagcaaggggcagttgcgggagctggagcgggagtatgcggctaacaagttcatcaccaaggacaagaggcgcaagatctcggcagccaccagcctctcggagcgccagattaccatctggtttcagaaccgccgggtcaaagagaagaaggttctcgccaaggtgaagaacagcgctaccccttaagagatctccttgcctgggtgggaggagcgaaagtgggggtgtcctggggagaccagaaacctgccaagcccaggctggggccaaggactctgctgagaggcccctagagacaacacccttcccaggccactggctgctggactgttcctcaggagcggcctgggtacccagtatgtgcagggagacggaaccccatgtgacaggcccactccaccagggttcccaaagaacctggcccagtcataatcattcatcctcacagtggcaataatcacgataaccagt

SEQ ID NO: 77 - DNA, 566 bp, Homo sapiens
cccaccaaacccataaagagggtgggtcgacccacgcgtccgcggacgcgtgggaaattattgaattggaaacagaaatagaaaagtttaaagctgagaacgcatctttagctaaacttcgcattgaacgagaaagtgccttggaaaaactcaggaaagaaattgcagacttcgaacaacagaaagcaaaagaattagctcgaatagaagagtttaaaaaggaggagatgaggaagctacaaaaggaacgtaaagtttttgaaaagtatactacagctgcaagaacttttccagataaaaaggaacgtgaagaaatacagactttaaaacagcaaatagcagatttacgggaagatttgaaaagaaaggagaccaaatggtcaagtacacacagccgtctcagaagccagatacaaatgttagtcagagagaacacagacctccgggaagaaataaaagtgatggaaagattccgactggatgcctggaagagagcagaagccatagagagcagcctcgaggtggagaagaaggacaagcttgcgaacacatctgttcgatttcaa

SEQ ID NO: 78 - DNA, 5067 bp, Homo sapiens
gcccggacacctgtctgcagcatggataagtatgacgacctgggcctggaggccagtaaattcatcgaggacctgaacatgtatgaggcctctaaggatgggctcttccgagtggacaagggtgcaggcaacaaccccgagtttgaggaaactcgcagggtgttcgccaccaagatggccaaaatccacctccagcagcagcagcagcagctcctgcaggaggagactctgcccagggggagtagaggccctgtcaatggagggggccgcctgggcccacaggcccgttgggaagttgtgggcagcaagctgactgtggatggtgctgccaagcctcctcttgctgcctcgacaggggcacctggggcagtcaccaccctcgctgctgggcagcccccgtacccaccgcaggagcagagatccaggccatacctgcatggcacgaggcatggcagccaggactgtggttccagggagagcctggcgacttctgagatgtctgctttccaccagccaggcccctgtgaggatccttcctgcctcactcatggagactattatgacaacctctccttggcaagcccaaagtggggtgacaaaccaggagtgtcccccagcatcggcctgagtgtagggagtgggtggcctagctccccggggagtgacccaccactgcccaaaccctgcggggaccatcccctaaatcaccgacagctctccctgagctccagcaggtcttctgagggtagcctcggtggtcagaatagtggcattggtggccgcagcagcgagaagccaacaggcctttggtccactgcctcctcccagcgggtgagccctggcctgccttccccaaacttggagaacggagcaccagctgtggggcctgttcagcccaggactccttctgtgtcagcacccttggccctgagctgccccaggcaaggaggtcttccaagatcaaactcggggctggggggtgaggtttcaggtgtgatgtccaaacccaatgtggacccccaaccctggttccaggatgggcccaaatcttacctttccagttctgccccgtcatcctcgccagctggcctggacggttcacagcagggtgcggtccctgggctggggccgaagcctggctgcacagaccttggcactggtcccaagctcagccccaccagtcttgtccatccagtgatgtccaccctgcctgagttatcttgtaaagagggtcccctgggctggtcttctgatggtagcctgggatctgtgctcctggacagccccagctcccctagggtaaggctgccctgccagcccctcgtcccaggtcctgagctgagaccctctgctgctgagttgaaattagaagccctcacccaacgtctggagcgagagatggatgctcacccgaaggctgattactttggagcctgtgtgaaatgcagcaaaggggtgtttggggctggccaggcctgtcaggccatggggaacctctaccatgacacatgcttcacctgtgcagcttgcagccggaagctgagaggaaaagccttttattttgtcaacggcaaagtgttttgtgaagaagacttcctgtactctggtttccagcagtcggctgacaggtgttttctttgtggacatctgatcatggacatgatcctgcaagccctggggaagtcctaccaccccggctgtttccgctgtgtcatctgtaatgagtgtttggatggggtgcccttcaccgtggactcagagaacaagatctactgtgtccgagattaccacaaggtgctggcccccaagtgtgcagcctgtgggcttcccatccttccacctgagggctcagatgagaccatccgtgtcgtgtccatggacagagactaccacgtggagtgttaccactgcgaggactgtggtctggagctcaatgatgaagatggccaccgctgttatccgctggaggaccacctgttctgtcactcctgccacgtgaagaggctggagaagagaccctcatctacagcccttcaccagcaccacttctagccagagccacttgcagacatcacggcaggggatgaggagccggggttgctgctgctgcttccggtggcccctggggtggaagtggggtaggggaagaggaggggcaggagggagagttcctgtgagcatgtggggggtgcctttcctttaaccagggaggtgaacactacctgcctcctgcgtgtattttccaagtgcttttctctgttgccacattttcctcaggttactcaggaaaatgctccagcatgtgcgagcacatgacctgaggttgcatcatagcaccaaaggaatcctcctgtcccctctgggaacatttcatgcttcagagggagaggtttttattgagcttgtttcacaatatccccttgaagggacagctcagctgccaatacattcaaccctttctcttccttcaggaaaatacctatacccaaatgttccctcccccgacatatatcatggcatgacttaaggcttcttttcacctgagagcttcagttcttctgcagaatggctgcaaatttaattgcattaaggcaagaaggaagctctaatgtgtgctttgtatcctaagataaatttgcttagaaaaccagagtcaagatttgaaataggtgaggcagggtttcctccttagacactgacagcattctccgtaccccttcaaatccttactctcctaaaggcagctgagtccgcgacagaaatttgccctatgggagtaaaacatactttgggagaagaacttggtgcaggcaccaggatttttttttttgcccacgtgtttgcgctgtttttctctggagttctcaagagttggtgacttggaaggccgcttctgcaaggcaagtctcaggaacccatgcaggtacatcgcttgcacctgtttttagcttatttaatgacgggcttttgggaagagctgcccgcatactgagagacagcttcttataaacaaggagagtttttgtgtgtgcgagatctctaagccagcgtgggagggagcgcctcaggataagttattatattcatttcgttggtttctctcctgcccaattcttggcacaggcattatgtttgaagaaaccaggataaggtacactgcttttgtctgtttaatttttttagttgtttcccttcactttcagtcttccacacacaaaaaatacctcacagagcttcaccaaatcacagattcaggaggaatttggctttcacactggactcagataccttcttcagtgtgttggaaatcactggcttcacacaggcccaactccaactggtcagggcagagtgatcgtaactaaaggtcagtggggaatagatccgattcagtgcttttgccttatgcatttcagcatcctggctccccagggtggcaggagctgaggaagggccacacactggcaagatttcaagaccactctctgcactgaagaggtaaaatttgcactgcaagtcacatccctgaggccagaggtcagtaccctttggtatttcgattagaagaagctgcaaaagaaaggcagcccattttaccattgccagccaggccggggacacaggagccggtgtgtgcactctgcctcctaacattgcacccagagcaagaggactgggtgctgggctgcagaggccggtcagtggagcccctagcacgtgtgaactcaggcttttcattgggcccggctccacttctaggccatgttttgactcatttggtaaccattgcctgtaagcagcacagaattggtgccatggattatcttttccatgttgatggaattcattctgttggaatcctttggccagatgtcacttcagccagggtgtgcatcatcattggttctttttcacaggctgagcctcctgaaaacccatgaacgctggggctggggaagtgaaccctgaggtggggaccctctcttcccatcaaatcatccagctcagtgtggggcgtggcaggggggtaaatgaagccagccaatgtgttaacctgtctctgtcaacctaagaatgttggccttactgacacacctttgctccatgttcaagaccagaagtagctgggatttgtttgcaaattgggtaattagtttaaaaatctgtgattacatttttaaatgaaattttcaaagtggcctagattgaggtgattcagataggtttgcgaatataccattttatattgttgagaaagaacaaaaagggaatttccagatgtcctagaaatcctagcaacagatttctctggttgtcagtttccctggagaaggcgccagataggaatctccaatcagttgtttttctcttcgcttcaggcccttacacaaaagccatgaagagatgttcacctacccggtattttaaatgttctgtaaattattagccaaatagaactgtaatggggttgtatttatgggcgcctagaaagaaaacacaaggacttggtaggccaggaagaaaagattttaaaatttagaatgaatagcccttctgggttttctttttgacaattcttggacttgaggtaaaacaaggaggattgtggccggatttcagatcccaaagccagcctccatcttaggcctttgcctcattgtgccttttaggttttcttacccaccgtctcctgttttgtcttttttttcttttctcctacccctatcttgggacattcagaaactgcctgggtggtttgagaagagacaacccagtttgatctgcaatacaaggatccattcgtaatctctctctcactgatgttattcccccatctgccgtcttggttcatctcaccacagaagggcatttagtcctacccagccatcggctgcggtatgacagcaggatggcacttcccatttctctgtggttagtgctcgagtgaaaacctctttcagctgagtcctctgaggttctgctgttgagtcctgggtggctgatggaatgattgaggaggtctggtcaccctcaagcgccgtcatcgccttgtttccatgggcttct

SEQ ID NO: 79 - DNA, 950 bp, Homo sapiens
tcgaccggatccgaattcccattgtgcactaaagcgtctccctgctccgcggcccgggctggcgggcgggcgctcggctggcggctgcagcagcagagggagacccgcggcaaccccggcaacccagggctcggcgtcgctgccaccatgacgggaagcaatatgtcggacgccttggccaacgccgtgtgccagcgctgccaggcccgcttctcccccgccgagcgcattgtcaacagcaatggggagctgtaccatgagcactgcttcgtgtgtgcccagtgcttccggcccttccccgaggggctcttctatgagtttgaaggccggaagtactgcgaacacgacttccaaatgctgtttgctccgtgctgtggatcctgcggtgagttcatcattggccgcgtcatcaaggccatgaacaacaactggcacccgggctgcttccgctgcgagctgtgtgatgtggagctggctgacctgggctttgtgaagaatgccggcaggcatctctgccggccttgccacaaccgtgagaaggccaagggcctgggcaagtacatctgccagcggtgccacctggtcatcgacgagcagcccctcatgttcaggagcgacgcctaccaccctgaccacttcaactgcacccactgtgggaaggagctgacagccgaggcccgcgagctgaagggtgagctctactgcctgccctgccatgacaagatgggcgttcccatctgcggggcctgccgccggcccatcgagggccgagtggtcaacgcgctgggcaagcagtggcacgtggagcactttgtctgtgccaagtgtgagaagccattcctggggcaccggcactatgagaagaagggcctggcctactgcgagctttagtgcacaatgggcggccgcctcgagtctagactcgagtagataattgagcggaatttctt

SEQ ID NO: 80 - DNA, 2346 bp, Homo sapiens
ccgccgtcgcccccgcctccccctgcctcagcggctgcccccgccagcgggccgcccgctcccccgggccttgcagcgggccccggcccggctggaggggccccgaccccagctctggtggcgggcagcagcgccgcggcccccttccctcacggggactcggccctgaacgagcaggagaaggagttgcagcggcggctgaagcgtctctacccggccgtggacgaacaagagacgccgctgcctcggtcctggagcccgaaggacaagttcagctacatcggcctctctcagaacaacctgcgggtgcactacaaaggtcatggcaaaaccccaaaagatgccgcgtcagttcgagccacgcatccaataccagcagcctgtgggatttattattttgaagtaaaaattgtcagtaagggaagagatggttacatgggaattggtctttctgctcaaggtgtgaacatgaatagactaccaggttgggataagcattcatatggttaccatggggatgatggacattcgttttgttcttctggaactggacaaccttatggaccaactttcactactggtgatgtcattggctgttgtgttaatcttatcaacaatacctgcttttacaccaagaatggacatagtttaggtattgctttcactgacctaccgccaaatttgtatcctactgtggggcttcaaacaccaggagaagtggtcgatgccaattttgggcaacatcctttcgtgtttgatatagaagactatatgcgggagtggagaaccaaaatccaggcacagatagatcgatttcctatcggagatcgagaaggagaatggcagaccatgatacaaaaaatggtttcatcttatttagtccaccatgggtactgtgccacagcagaggcctttgccagatctacagaccagaccgttctagaagaattagcttccattaagaatagacaaagaattcagaaattggtattagcaggaagaatgggagaagccattgaaacaacacaacagttatacccaagtttacttgaaagaaatcctaatctccttttcacattaaaagtgcgtcagtttatagaaatggtgaatggtacagatagtgaagtacgatgtttgggaggccgaagtccaaagtctcaagacagttatcctgttagtcctcgaccttttagtagtccaagtatgagccccagccatggaatgaatatccacaatttagcatcaggcaaaggaagcaccgcacatttttcaggttttgaaagttgtagtaatggtgtaatatcaaataaagcacatcaatcatattgccatagtaataaacaccagtcatccaacttgaatgtaccagaactaaacagtataaatatgtcaagatcacagcaagttaataacttcaccagtaatgatgtagacatggaaacagatcactactccaatggagttggagaaacttcatccaatggtttcctaaatggtagctctaaacatgaccacgaaatggaagattgtgacaccgaaatggaagttgattcaagtcagttgagacgccagttgtgtggaggaagtcaggccgccatagaaagaatgatccactttggacgagagctgcaagcaatgagtgaacagctaaggagagactgtggcaagaacactgcaaacaaaaaaatgttgaaggatgcattcagtctactagcatattcagatccctggaacagcccagttggaaatcagcttgacccgattcagagagaacctgtgtgctcagctcttaacagtgcaatattagaaacccacaatctgccaaagcaacctccacttgccctagcaatgggacaggccacacaatgtctaggactgatggctcgatcaggaattggatcctgcgcatttgccacagtggaagactacctacattagctatgcatttcaagagctcacacttatattgtggcatatagtcaacatggaagtagaccagctctgctgatttgaaatttagattttttaaattatgtactggggacaggtttttgtcgctttacattgcttcctagtttacagcatgatgcaaatgattttctaacttagtgttaggagaaattattttccatctttaacctcttagttgtctaagagttaaatattactgaatttcagacgttcaaattgatcatcacaaatcctttaaaacaattacctaaaagaaaccaaaaatcctgccttctttgtgggggaggggggagagaggggaaggaaatggaacaagttgtgtttgtgttagcatgtgggtgatgtaaacttcaaattgggagatgttccgacccc

SEQ ID NO: 81 - DNA, 2512 bp, Homo sapiens
caatgcactgacggatatgagtgggatcctgtgagacagcaatgcaaagatattgatgaatgtgacattgtcccagacgcttgtaaaggtggaatgaagtgtgtcaaccactatggaggatacctctgccttccgaaaacagcccagattattgtcaataatgaacagcctcagcaggaaacacaaccagcagaaggaacctcaggggcaaccaccggggttgtagctgccagcagcatggcaaccagtggagtgttgcccgggggtggttttgtggccagtgctgctgcagtcgcaggccctgaaatgcagactggccgaaataactttgtcatccggcggaacccagctgaccctcagcgcattccctccaacccttcccaccgtatccagtgtgcagcaggctacgagcaaagtgaacacaacgtgtgccaagacatagacgagtgcactgcagggacgcacaactgtagagcagaccaagtgtgcatcaatttacggggatcctttgcatgtcagtgccctcctggatatcagaagcgaggggagcagtgcgtagacatagatgaatgtaccatccctccatattgccaccaaagatgcgtgaatacaccaggctcattttattgccagtgcagtcctgggtttcaattggcagcaaacaactatacctgcgtagatataaatgaatgtgatgccagcaatcaatgtgctcagcagtgctacaacattcttggttcattcatctgtcagtgcaatcaaggatatgagctaagcagtgacaggctcaactgtgaagacattgatgaatgcagaacctcaagctacctgtgtcaatatcaatgtgtcaatgaacctgggaaattctcatgtatgtgcccccagggataccaagtggtgagaagtagaacatgtcaagatataaatgagtgtgagaccacaaatgaatgccgggaggatgaaatgtgttggaattatcatggcggcttccgttgttatccacgaaatccttgtcaagatccctacattctaacaccagagaaccgatgtgtttgcccagtctcaaatgccatgtgccgagaactgccccagtcaatagtctacaaatacatgagcatccgatctgataggtctgtgccatcagacatcttccagatacaggccacaactatttatgccaacaccatcaatacttttcggattaaatctggaaatgaaaatggagagttctacctacgacaaacaagtcctgtaagtgcaatgcttgtgctcgtgaagtcattatcaggaccaagagaacatatcgtggacctggagatgctgacagtcagcagtatagggaccttccgcacaagctctgtgttaagattgacaataatagtggggccattttcattttagtcttttctaagagtcaaccacaggcatttaagtcagccaaagaatattgttaccttaaagcactattttatttatagatatatctagtgcatctacatctctatactgtacactcacccataacaaacaattacaccatggtataaagtgggcatttaatatgtaaagattcaaagtttgtctttattactatatgtaaattagacattaatccactaaactggtcttcttcaagagagctaagtatacactatctggtgaaacttggattctttcctataaaagtgggaccaagcaatgatgatcttctgtggtgcttaaggaaacttactagagctccactaacagtctcataaggaggcagccatcataaccattgaatagcatgcaagggtaagaatgagtttttaactgctttgtaagaaaatggaaaaggtcaataaagatatatttctttagaaaatggggatctgccatatttgtgttggtttttattttcatatccagcctaaaggtggttgtttattatatagtaataaatcattgctgtacaacatgctggtttctgtagggtatttttaattttgtcagaaattttagattgtgaatattttgtaaaaaacagtaagcaaaattttccagaattcccaaaatgaaccagataccccctagaaaattatactattgagaaatctatggggaggatatgagaaaataaattccttctaaaccacattggaactgacctgaagaagcaaactcggaaaatataataacatccctgaattcaggcattcacaagatgcagaacaaaatggataaaaggtatttcactggagaagttttaatttctaagtaaaatttaaatcctaacacttcactaatttataactaaaatttctcatcttcgtacttgatgctcacagaggaagaaaatgatgatggtttttattcctggcatccagagtgacagtgaacttaagcaaattaccctcctacccaattctatggaatattttatacgtctccttgtttaaaatctgactgctttactttgatgtatcatatttttaaataaaaataaatattcctttagaagatcactctaaaa

SEQ ID NO: 82 - DNA, 2306 bp, Homo sapiens
gggcgggagctgcacgcgccgtggctccggatctcttcgtctttgcagcgtacgcccgagtcggtcagcgccggaggacctcagcagccatgtcgaagccccatagtgaagccgggactgccttcattcagacccagcagctgcacgcagccatggctgacacattcctggagcacatgtgccgcctggacattgattcaccacccatcacagcccggaacactggcatcatctgtaccattggcccagcttcccgatcagtggagacgttgaaggagatgattaagtctggaatgaatgtggctcgtctgaacttctctcatggaactcatgagtaccatgcggagaccatcaagaatgtgcgcacagccacggaaagctttgcttctgacccctacctctaccggcccgttgctgtggctctagacactaaaggacctgagatccgaactgggctcatcaagggcagcggcactgcagagctggagctgaagaagggagccactctcaaaatcacgctggataacgcctacatggaaaagtgtgacgagaacatcctgtggctggactacaagaacatctgcaaggtggtggaagtgggcagcaagatctacgtggatgatgggcttatttctctccaggtgaagcagaaaggtgccgacttcctggtgacggaggtggaaaatggtggctccttgggcagcaagaagggtgtgaaccttcctggggctgctgtggacttgcctgctgtgtcggagaaggacatccaggatctgaagtttggggtcgagcaggatgttgatatggtgtttgcgtcattcatccgcaaggcatctgatgtccatgaagttaggaaggtcctgggagagaagggaaagaacatcaagattatcagcaaaatcgagaatcatgagggggttcggaggtttgatgaaatcctggaggccagtgatgggatcatggtggctcgtggtgatctaggcattgagattcctgcagagaaggtcttccttgctcagaagatgatgattggacggtgcaaccgagctgggaagcctgtcatctgtgctactcagatgctggagagcatgatcaagaagccccgccccactcgggctgaaggcagtgatgtggccaatgcagtcctggatggagccgactgcatcatgctgtctggagaaacagccaaaggggactatcctctggaggctgtgcgcatgcagcacctgattgcccgtgaggcagaggctgccatctaccacttgcaattatttgaggaactccgccgcctggcgcccattaccagcgaccccacagaagccaccgccgtgggtgccgtggaggcctccttcaagtgctgcagtggggccataatcgtcctcaccaagtctggcaggtctgctcaccaggtggccagataccgcccacgtgcccccatcattgctgtgacccggaatccccagacagctcgtcaggcccacctgtaccgtggcatcttccctgtgctgtgcaaggacccagtccaggaggcctgggctgaggacgtggacctccgggtgaactttgccatgaatgttggcaaggcccgaggcttcttcaagaagggagatgtggtcattgtgctgaccggatggcgccctggctccggcttcaccaacaccatgcgtgttgttcctgtgccgtgatggaccccagagcccctcctccagcccctgtcccacccccttcccccagcccatccattaggccagcaacgcttgtagaactcactctgggctgtaacgtggcactggtaggttgggacaccagggaagaagatcaacgcctcactgaaacatggctgtgtttgcagcctgctctagtgggacagcccagagcctggctgcccatcatgtggccccacccaatcaagggaagaaggaggaatgctggactggaggcccctggagccagatggcaagagggtgacagcttcctttcctgtgtgtactctgtccagttcctttagaaaaaatggatgcccagaggactcccaaccctggcttggggtcaagaaacagccagcaagagttaggggccttagggcactgggctgttgttccattgaagccgactctggccctggcccttacttgcttctctagctctctaggcctctccagtttgcacctgtccccaccctccactcagctgtcctgcagcaaacactccaccctccaccttccattttcccccactactgcagcacctccaggcctgttgctatagagcctacctgtatgtcaataaacaacagctgaagcacc

SEQ ID NO: 83 - DNA, 2656 bp, Homo sapiens
gaattcgcggccgcagagtccccgggccaagatggctgcgcggtgctccacacgctggttgctggtggttgtggggaccccgcggctgccggctatatcgggtagaggggcccggccgcccagggagggcgtggtgggggcatggctgagccgcaagctgagcgtccccgcctttgcgtcttccctgacctcttgcggcccccgagcgctgctgacattgagacctggtgtcagccttacaggaacaaaacataaccctttcatttgtactgcctccttccacacgagtgcccctttggccaaagaagattattatcagatattaggagtgcctcgaaatgccagccagaaagagatcaagaaagcctattatcagcttgccaagaagtatcaccctgacacaaataaggatgatcccaaagccaaggagaagttctcccagctggcagaagcctatgaggttttgagtgatgaggtgaagaggaagcagtacgatgcctacggctctgcaggcttcgatcctggggccagcggctcccagcatagctactggaagggaggccccactgtggaccccgaggagctgttcaggaagatctttggcgagttctcatcctcttcatttggagatttccagaccgtgtttgatcagcctcaggaatacttcatggagttgacattcaatcaagctgcaaagggggtcaacaaggagttcaccgtgaacatcatggacacgtgtgagcgctgcaacggcaaggggaacgagcccggcaccaaggtgcagcattgccactactgtggcggctccggcatggaaaccatcaacacaggcccttttgtgatgcgttccacgtgtaggagatgtggtggccgcggctccatcatcatatcgccctgtgtggtctgcaggggagcaggacaagccaagcagaaaaagcgagtgatgatccctgtgcctgcaggagtcgaggatggccagaccgtgaggatgcctgtgggaaaaagggaaattttcattacgttcagggtgcagaaaagccctgtgttccggagggacggcgcagacatccactccgacctctttatttctatagctcaggctcttcttgggggaacagccagagcccagggcctgtacgagacgatcaacgtgacgatcccccctgggactcagacagaccagaagattcggatgggtgggaaaggcatcccccggattaacagctacggctacggagaccactacatccacatcaagatacgagttccaaagaggctaacgagccggcagcagagcctgatcctgagctacgccgaggacgagacagatgtggaggggacggtgaacggcgtcaccctcaccagctctggtggcagcaccatggatagctccgcaggaagcaaggctaggcgtgaggctggggaggacgaggagggattcctttccaaacttaagaaaatgtttacctcatgatatcccagccgaggaaaaagatccactggaaactaggccgggaagcagcagcccctccaagggccagggcacctgggagacgggaggattccagaacagcagcactgagctcccacccgcagagcctctggacggccttggcaacagcaaaatcatgggacaacacctctctccacggaaaggtcacagtggacagcccgggcagtaggatgcagccccagaggctggtggcagtttcctgtccattggtaggtgacggccccctggtcagcagaggagaggttagatcttgcaggctaaaactctaatttggaattgaatattgtggatatcttagttaaaggccatgcttacagcttagaaatgaagccttaagctgcatcaagttacgaagtgattaatttccttctcagcaaacctccgggaggttccagaatgagttcttcctgacaggttgtcttcactgggagcgtggggcccccaggccccaccagcaccgtcctcccctaatgaggggccctgccgaggcatcagctgctctgctcagttagtttttattcccggggtaccaagcagctgcacagtcggtgcctgggaagcacgttaaaggcccagagagatcctgggggttctgctctgaccgtgtgggtggtgatccttgtcaggatgtacagtccttgctcccaccccatccgggatggccgcctgtccctgactattgagtcctgttgttgtaagccaggcatggagggctcctgcccttctgctgagccacagcccattgcagcactgtgctggccagacttcagctgccttgggaactgaagccctgccactgttgctagtcaggggcttggttctcccacttacactgttgacatctattttctgaagtgtgtttaaattattcagtgctaatcattgttttttcctttgtaaatgttgattcagaaaaggaaagcacaggctaagcagttgaaggttccccaccattcagtgagagcagaacccccattccccagcctctgctggtagcatgtcgcagtttccatgtgtttcaggatcttcgggctgtcgttagacaggttaatgaagaacacttctcaacagtttcctttttgttttcctttataattcactaaaataaagcatctattagtgtctgaaaaaaaaaaaaaaaaa

SEQ ID NO: 84 - DNA, 2217 bp, Homo sapiens
gcggacccggcgccgaggcggccacccgagacgcggcgcgcacgctccggcctgcgcagcccggcccggccatggcggccccccgcccgtctcccgcgatctccgtttcggtctcggctccggctttttacgccccgcagaagaagttcggccctgtggtggccccaaagcccaaagtgaatcccttccggcccggggacagcgagcctcccccggcacccggggcccagcgcgcacagatgggccgggtgggcgagattcccccgccgcccccggaagactttcccctgcctccacctccccttgctggggatggcgacgatgcagagggtgctctgggaggtgccttcccgccgccccctcccccgatcgaggaatcatttccccctgcgcctctggaggaggagatcttcccttccccgccgcctcctccggaggaggagggagggcctgaggcccccataccgcccccaccacagcccagggagaaggtgagcagtattgatttggagatcgactctctgtcctcactgctggatgacatgaccaagaatgatcctttcaaagcccgggtgtcatctggatatgtgcccccaccagtggccactccattcagttccaagtccagtaccaagcctgcagccgggggcacagcacccctgcctccttggaagtccccttccagctcccagcctctgccccaggttccggctccggctcagagccagacacagttccatgttcagccccagccccagcccaagcctcaggtccaactccatgtccagtcccagacccagcctgtgtctttggctaacacccagccccgagggcccccagcctcatctccggctccagcccctaagttttctccagtgactcctaagtttactcctgtggcttccaagttcagtcctggagccccaggtggatctgggtcacaaccaaatcaaaaattggggcaccccgaagctctttctgctggcacaggctcccctcaacctcccagcttcacctatgcccagcagagggagaagccccgagtgcaggagaagcagcaccccgtgcccccaccggctcagaaccaaaaccaggtgcgctcccctggggccccagggcccctgactctgaaggaggtggaggagctggagcagctgacccagcagctaatgcaggacatggagcatcctcagaggcagaatgtggctgtcaacgaactctgcggccgatgccatcaacccctggcccgggcgcagccagccgtccgcgctctagggcagctgttccacatcgcctgcttcacctgccaccagtgtgcgcagcagctccagggccagcagttctacagtctggagggggcgccgtactgcgagggctgttacactgacaccctggagaagtgtaacacctgcggggagcccatcactgaccgcatgctgagggccacgggcaaggcctatcacccgcactgcttcacctgtgtggtctgcgcccgccccctggagggcacctccttcatcgtggaccaggccaaccggccccactgtgtccccgactaccacaagcagtacgccccgaggtgctccgtctgctctgagcccatcatgcctgagcctggccgagatgagactgtgcgagtggtcgccctggacaagaacttccacatgaagtgttacaagtgtgaggactgcgggaagcccctgtcgattgaggcagatgacaatggctgcttccccctggacggtcacgtgctctgtcggaagtgccacactgctagagcccagacctgagtgaggacaggccctcttcagaccgcagtccatgccccattgtggaccacccacactgagaccacctgcccccacctcagttattgttttgatgtctagcccctcccatttccaacccctccctagcatcccaggtgccctgacccaggacccaacatggtctagggatgcaggatccccgccctggggtctggtcctcgcccatcctgcagggattgcccaccgtcttccagacaccccacctgaggggggcaccaggtttagtgctgctgctttcactgctgcacccgcgccctcggccggccccccgagcagcctttgtactctgcttgcggagggctgggagaccctccaggacattcccaccctcccccatgctgccaagttgtagctatagctacaaataaaaaaaaaccttgttttccag

SEQ ID NO: 85 - DNA, 8906 bp, Homo sapiens
gaggcggccaaggacctggccgacatcgcggccttcttccgatccgggtttcgaaaaaacgatgaaatgaaagctatggatgttttaccaattttgaaggaaaaagttgcatacctttcaggtgggagagataaacgtggaggtcccattttaacgtttccggcccgcagcaatcatgacagaatacgacaggaggatctcaggagactcatttcctatctagcctgtattcccagcgaggaggtctgcaagcgtggcttcacggtgatcgtggacatgcgtgggtccaagtgggactccatcaagccccttctgaagatcctgcaggagtccttcccctgctgcatccatgtggccctgatcatcaagccagacaacttctggcagaaacagaggactaattttggcagttctaaatttgaatttgagacaaatatggtctctttagaaggccttaccaaagtagttgatccttctcagctaactcctgagtttgatggctgcctggaatacaaccacgaagaatggattgaaatcagagttgcttttgaagactacattagcaatgccacccacatgctgtctcggctggaggaacttcaggacatcctagctaagaaggagctgcctcaggatttagagggggctcggaatatgatcgaggaacattctcagctgaagaagaaggtgattaaggcccccatcgaggacctggatttggagggacagaagctgcttcagaggatacagagcagtgaaagctttcccaaaaagaactcaggctcaggcaatgcggacctgcagaacctcttgcccaaggtgtccaccatgctggaccggctgcactcgacacggcagcatctgcaccagatgtggcatgtgaggaagctgaagctggaccagtgcttccagctgaggctgtttgaacaggatgctgagaagatgtttgactggatcacacacaacaaaggcctgtttctaaacagctacacagagattgggaccagccaccctcatgccatggagcttcagacgcagcacaatcactttgccatgaactgtatgaacgtgtatgtaaatataaaccgcatcatgtcggtggccaatcgtctggtggagtctggccactatgcctcgcagcagatcaggcagatcgcgagtcagctggagcaggagtggaaggcgtttgcggcagccctggatgagcggagcaccttgctggacatgtcctccattttccaccagaaggccgaaaagtatatgagcaacgtggattcatggtgtaaagcttgcggtgaggtagaccttccctcagagctgcaggacctagaagatgccattcatcaccaccagggaatatatgaacatatcactcttgcttattctgaggtcagccaagatgggaagtcgctccttgacaagctccagcggcccttgactcccggcagctccgattccctgacagcctctgccaactactccaaggccgtgcaccatgtcctggatgtcatccacgaggtgctgcaccaccagcggcacgtgagaacaatctggcaacaccgcaaggtccggctgcatcagaggctgcagctgtgtgttttccagcaggaagttcagcaggtgctagactggatcgagaaccacggagaagcatttctgagcaaacatacaggtgtggggaaatctcttcatcgggccagagcattgcagaaacgtcatgaagattttgaagaagtggcacagaacacatacaccaatgcggataaattactggaagcagcagaacagctggctcagactggggaatgtgaccccgaagagatttatcaggctgcccatcagctggaagaccggattcaagatttcgttcggcgtgttgagcagcgaaagatcctactggacatgtcagtgtcctttcacacccatgtgaaagagctgtggacgtggctggaggagctgcagaaggagctgctggacgacgtgtatgccgagtcggtggaggccgtgcaggacctcatcaagcgctttggccagcagcagcagaccaccctgcaggtgactgtcaacgtgatcaaggaaggggaggacctcatccagcagctcagggactctgccatctccagtaacaagaccccccacaacagctccatcaaccacattgagacggtgctgcagcagctggacgaggcgcagtcgcagatggaggagctcttccaggagcgcaagatcaagctggagctcttcctgcacgtgcgcatcttcgagagggacgccatcgacattatctcagacctcgagtcttggaatgatgagctttctcagcaaatgaatgacttcgacacagaagatctcacgattgcagagcagcgcctccagcaccatgcagacaaagccttgaccatgaacaacttgacttttgacgtcatccaccaagggcaagatcttctgcagtatgtcaatgaggtccaggcctctggtgtggagctgctgtgtgatagagatgtagacatggcaactcgggtccaggacctgctggagtttcttcatgaaaaacagcaggaattggatttagccgcagagcagcatcggaaacacctggagcagtgcgtgcagctgcgccacctgcaggcagaagtgaaacaggtgctgggttggatccgcaacggagagtccatgttaaatgccggacttatcacagccagctcgttacaagaggcagagcagctccagcgagagcacgagcagttccagcatgccattgagaaaacacatcagagcgcgctgcaggtgcagcagaaggcagaagccatgctacaggccaaccactacgacatggacatgatccgggactgcgccgagaaggtggcgtctcactggcaacagctcatgctcaagatggaagatcgcctcaagctcgtcaacgcctctgtcgctttctacaaaacctcagagcaggtctgcagcgtcctcgagagcctggaacaggagtacaagagagaagaagactggtgtggcggggcggataagctgggcccaaactctgagacggaccacgtgacgcccatgatcagcaagcacctggagcagaaggaggcattcctgaaggcttgcacccttgctcggaggaatgcagacgtcttcctgaaatacctgcacaggaacagcgtgaacatgccaggaatggtgacgcacatcaaagctcctgaacagcaagtgaaaaatatcttgaatgaactcttccaacgggagaacagggtattgcattactggaccatgaggaagagacggctggaccagtgtcagcagtacgtggtctttgagaggagtgccaagcaggctttggaatggatccatgacaatggcgagttctacctttccacacacacctccacgggctccagtatacagcacacccaggagctcctgaaagagcacgaggagttccagataactgcaaagcaaaccaaagagagagtgaagctattgatacagctggctgatggcttttgtgaaaaagggcatgcccatgcggcagagataaaaaaatgtgttactgctgtggataagaggtacagagatttctctctgcggatggagaagtacaggacctctttggaaaaagccctggggatttcttcagattccaacaaatcgagtaaaagtctccagctagatatcattccagccagtatccctggctcagaggtgaaacttcgagatgctgctcatgaacttaatgaagagaagcggaaatctgcccgcaggaaagagttcataatggctgagctcattcaaactgaaaaggcttatgtaagagacctccgggaatgtatggatacgtacctgtgggaaatgaccagtggcgtggaagagattccacctggcattgtaaacaaagaactcatcatcttcggaaacatgcaagaaatctacgaatttcataataacatattcctaaaggagctggaaaaatatgaacagttgccagaggatgttggacattgttttgttacttgggcagacaagtttcagatgtatgtcacatattgcaaaaataagcctgattctactcagctgatattggaacatgcagggtcctattttgacgagatacagcagcgacatggattagccaattccatttcttcctaccttattaaaccagttcagcgaataacgaaatatcagctccttttaaaagagctgctgacgtgctgtgaggaaggaaagggagagattaaagatggcctggaggtgatgctcagcgtgccgaagcgagccaatgacgccatgcacctcagcatgctggaagggtttgatgaaaacattgagtctcagggagaactcatcctacaggaatccttccaagtgtgggacccaaaaaccttaattcgaaagggtcgagaacggcatctcttcctttttgaaatgtccttagtatttagtaaagaagtgaaagattccagtgggagaagcaagtacctttataaaagcaaattgtttacctcagagttgggtgtcacagaacatgttgaaggagacccttgcaaatttgcactgtgggtggggagaacaccaacttcagataataaaattgtccttaaggcttccagcatagagaacaagcaggactggataaagcatatccgcgaagtcatccaggagcggacgatccacctgaagggagccctgaaggagcccattcacatccctaagaccgctcccgccacaagacagaagggaaggagggatggagaggatctggacagccaaggagacggcagcagccagcctgatacgatttccatcgcctcacggacgtctcagaacacgctggacagcgataagctctctggtggctgtgagctgacagtggtgatccatgacttcaccgcttgcaacagcaacgagctgaccatccgacggggccagaccgtggaagttctggagcggccgcatgacaagcctgactggtgtctggtgcggaccactgaccgctccccagcggcagaaggcctggtcccctgtggttcactgtgcatcgcccactccagaagtagcatggaaatggagggcatcttcaaccacaaagactcgctctccgtctccagcaatgacgccagtccacccgcatccgtggcttccctccagccccacatgatcggggcccagagctcgccgggccccaagcggccgggcaacaccctgcgcaagtggctcaccagccccgtgcggcggctcagcagcggcaaggccgacgggcacgtgaagaagctggcgcacaagcacaagaagagccgcgaggtccgcaagagcgccgacgccggctcgcagaaggactccgacgacagtgcggccaccccgcaggacgagacggtcgaggagagaggccggaacgagggcctgagcagcggtactctctccaaatcctcctcctcggggatgcagagctgtggagaagaggaaggcgaggagggggccgacgccgtgcccctgccgccacccatggccatccagcagcacagcctcctccagccagactcacaggatgacaaggcctcttctcggttattagtccgccccaccagctccgaaacaccgagtgcagccgagctcgtcagtgcaattgaggaactcgtgaaaagcaagatggcactggaggatcgccccagctcactccttgttgaccagggagatagtagcagcccttccttcaacccttcggataattcccttctctcttcctcctcgcccattgatgagatggaagaaaggaaatccagctctttaaagagaagacactacgttttgcaagaactagtggagacagagcgtgactatgtgcgggaccttggctatgtggttgagggctacatggcacttatgaaagaagatggtgttcctgatgacatgaaaggaaaagacaaaattgtgttcggcaacatccatcagatttacgactggcacagagacttttttttaggagagttagagaagtgccttgaagatccagaaaaactaggatccctttttgttaaacacgagagaaggttgcacatgtacatagcttattgtcaaaataaaccaaagtctgagcacattgtctcagaatacattgataccttttttgaggacttaaagcagcgtcttggccacaggttacagctcacagatctgttgatcaaaccagtgcagagaatcatgaagtatcagctgttactgaaggacttcctcaagtattccaaaaaggccagcctggatacatcagaattagagagagctgtggaagtcatgtgcatagtacccaggcggtgcaacgacatgatgaacgtggggcggctgcaaggattcgacgggaaaatcgttgcccagggtaaactgctcttgcaggacacattcttggtcacagaccaagatgcaggacttctgcctcgctgcagagagaggcgcatcttcctctttgagcagatcgtcatattcagcgaaccacttgataaaaagaagggcttctccatgccgggattcctgtttaagaacagtatcaaggtgagttgcctttgcctggaggaaaatgtggaaaatgatccctgtaaatttgctctgacatcgaggacgggtgacgtggtagagaccttcattttgcattcatctagtccaagtgtccggcaaacttggatccatgaaatcaaccaaattttagaaaaccagcgcaattttttaaatgccttgacatcgccaatcgagtaccagaggaaccacagcgggggcggcggcggcggcggcagcggggcagcggcgggggtgggggcagcggcggcggcggggcccccagtggcggcagcggccacagtggcggccccagcagctgcggcggcgcccccagcacgagcaggagccggccctcccggatcccccagcctgtccgacaccacccccccgtgctggtctcctctgcagcctcgagccaggcagaggcagacaagatgtcagagtgaaagcagcagcagtagcaacatctccaccatgttggtgacacacgattacacggcagtgaaggaggatgagatcaacgtctaccaaggagaggtcgttcaaattctggccagcaaccagcagaacatgtttctggtgttccgagccgccactgaccagtgccccgcagctgagggctggattccaggctttgtcctgggccacaccagtgcagtcatcgtggagaacccggacgggactctcaagaagtcaacatcttggcacacagcactccgtttaaggaaaaaatctgagaaaaaagataaagacggcaaaagggaaggcaagttagagaacggttatcggaagtcacgggaaggactcagcaacaaggtatctgtgaagcttctcaatcccaactacatttatgacgttcccccagaattcgtcattccattgagtgaggtcacgtgtgagacaggggagaccgttgttcttagatgtcgagtctgtggccgccccaaagcctcaattacctggaagggccctgaacacaacaccttgaacaacgatggtcactacagcatctcctacagtgacctgggagaggccacgctgaagattgtgggcgtgaccacggaagatgacggcatctacacgtgcatcgctgtcaatgacatgggttcagcctcatcatcggccagcctgagggtcctaggtccagggatggatgggatcatggtgacctggaaagacaactttgactccttctacagtgaagtggctgagcttggcaggggcagattctctgtcgttaagaaatgtgatcagaaaggaaccaagcgagcagtggccactaagtttgtgaacaagaagttgatgaagcgcgaccaggtcacccatgagcttggcatcctgcagagcctccagcaccccctgcttgtcggcctcctcgacacctttgagacccccaccagctacatcctggtcttagaaatggctgaccagggtcgcctcctggactgcgtggtgcgatggggaagcctcactgaagggaagatcagggcgcacctgggggaggttctggaagctgtccggtacctgcacaactgcaggatagcacacctggacctaaagcctgagaatatcctggtggatgagagtttagccaagccaaccatcaaactggctgactttggagatgctgttcagctcaacacgacctactacatccaccagttactggggaaccctgaattcgcagcccctgaaatcatcctcgggaaccctgtctccctgacctcggatacgtggagtgttggagtgctcacatacgtacttcttagtggcgtgtcccccttcctggatgacagtgtggaagagacctgcctgaacatttgccgcttagactttagcttcccagatgactactttaaaggagtgagccagaaggccaaggagttcgtgtgcttcctcctgcaggaggaccccgccaagcgtccctcggctgcgctggccctccaggagcagtggctgcaggccggcaacggcagaagcacgggcgtcctcgacacgtccagactgacttccttcattgagcggcgcaaacaccagaatgatgttcgacctatccgtagcattaaaaactttctgcagagcaggcttctgcctagagtttgacctatccagaagttctttctcattctctttcacctgccaatcagctgttaatctgaattttcaagagaaaacaagcaaacataactgatcagctgccggtatgttcatcgtgtgaaattgcattccaagtgagctgtgctcagcagtgcttggacacagagctgcaagctgcgctggggtggaggaccgtcacttacactctgccaaggacggaggtcgcattgctgtatcacagtattttttacggatttctg

SEQ ID NO: 86 - DNA, 1204 bp, Homo sapiens
tcggcggcggtggtatcggcggcagctgtgagggggttccgggaagatggtgctgatcaaggaattccgtgtggttttgccatgttctgttcaggagtatcaggttgggcagctttactctgttgcagaagctagtaagaatgagactggtggtggagaaggaattgaagtcttaaagaatgaaccttatgagaaggatggagaaaagggacagtatacgcacaaaatttatcacctaaagagcaaagtgcctgcattcgtgaggatgattgctcccgagggctccttggtgtttcatgagaaagcctggaatgcgtacccctactgtagaacaattgtaacgaatgaatatatgaaagatgatttcttcattaaaatcgaaacatggcacaaaccagacttgggaacattagaaaatgtacatggtttagatccaaacacatggaaaactgttgaaattgtccatatagatattgcagatagaagtcaagttgaaccagcagactacaaagctgatgaagacccagcattattccagtcagtcaagaccaagagaggccctttgggacccaactggaagaaggagctggcaaacagccctgactgtccccagatgtgtgcctataagctggtgaccatcaaattcaagtggtggggactgcaaagcaaagtagaaaacttcattcaaaagcaagaaaaacggatatttacaaacttccatcgccagcttttttgttggattgacaagtggatcgatctcacgatggaagacattaggagaatggaagacgagactcagaaagaactagaaacaatgcgtaagaggggttccgttcgaggcacgtcggctgctgatgtctagatgagtcccctgtagggtcagagacaatgtcaaactgtttacgtaatcaaggtcaagtgaggggaacaagcgcagccagtgatgagtgaacaacaatctgaccagtatcttgcagtgttgacgtttcccagatgtgtgcttgtgatgatacacacacatgcacaggttctcaaccacgtgtgtatatatgtatgtgtgcatatgtctgtagctgtatataaagcgcatgtagagctacagatccagatacacacacttgtgtatatatgtacatacagacatactgaagggattagtacaatttctccaaagtactgtacctatcttcagcaagaatgcaaa

SEQ ID NO: 87 - protein, 892 aa, Homo sapiens
MDHYDSQQTNDYMQPEEDWDRDLLLDPAWEKQQRKTFTAWCNSHLRKAGTQIENIEEDFRDGLKLMLLLEVISGERLAKPERGKMRVHKISNVNKALDFIASKGVKLVSIGAEEIVDGNVKMTLGMIWTIILRFAIQDISVEETSAKEGLLLWCQRKTAPYKNVNIQNFHISWKDGLGFCALIHRHRPELIDYGKLRKDDPLTNLNTAFDVAEKYLDIPKMLDAEDIVGTARPDEKAIMTYVSSFYHAFSGAQKAETAANRICKVLAVNQENEQLMEDYEKLASDLLEWIRRTIPWLENRVPENTMHAMQQKLEDFRDYRRLHKPPKVQEKCQLEINFNTLQTKLRLSNRPAFMPSEGRMVSDINNAWGCLEQVEKGYEEWLLNEIRRLERLDHLAEKFRQKASIHEAWTDGKEAMLRQKDYETATLSEIKALLKKHEAFESDLAAHQDRVEQIAAIAQELNELDYYDSPSVNARCQKICDQWDNLGALTQKRREALERTEKLLETIDQLYLEYAKRAAPFNNWMEGAMEDLQDTFIVHTIEEIQGLTTAHEQFKATLPDADKERLAILGIHNEVSKIVQTYHVNMAGTNPYTTITPQEINGKWDHVRQLVPRRDQALTEEHARQQHNERLRKQFGAQANVIGPWIQTKMEEIGRISIEMHGTLEDQLSHLRQYEKSIVNYKPKIDQLEGDHQLIQEALIFDNKHTNYTMEHIRVGWEQLLTTIARTINEVENQILTRDAKGISQEQMNEFRASFNHFDRDHSGTLGPEEFKACLISLGYDIGNDPQGEAEFARIMSIVDPNRLGVVTFQAFIDFMSRETADTDTADQVMASFKILAGDKNYITMDELRRELPPDQAEYCIARMAPYTGPDSVPGALDYMSFSTALYGESDL

SEQ ID NO: 88 - protein, 197 aa, Homo sapiens
MMFPQSRHSGSSHLPQQLKFTTSDSCDRIKDEFQLLQAQYHSLKLECDKLASEKSEMQRHYVMYYEMSYGLNIEMHKQAEIVKRLNGICAQVLPYLSQEHQQQVLGAIERAKQVTAPELNSIIRQQLQAHQLSQLQALALPLTPLPVGLQPPSLPAVSAGTGLLSLSALGSQAHLSKEDKNGHDGDTHQEDDGEKSD

SEQ ID NO: 89 - protein, 739 aa, Homo sapiens
GDKEPTETIGDLSICLDGLQLESEVVTNGETTCSESASQNDDGSRSKDETRVSTNGSDDPEDAGAGENRRVSGNNSPSLSNGGFKPSRPPRPSRPPPPTPRRPASVNGSPSATSESDGSSTGSLPPTNTNTNTSEGATSGLIIPLTISGGSGPRPLNPVTQAPLPPGWEQRVDQHGRVYYVDHVEKRTTWDRPEPLPPGWERRVDNMGRIYYVDHFTRTTTWQRPTLESVRNYEQWQLQRSQLQGAMQQFNQRFIYGNQDLFATSQSKEFDPLGPLPPGWEKRTDSNGRVYFVNHNTRITQWEDPRSQGQLNEKPLPEGWEMRFTVDGIPYFVDHNRRTTTYIDPRTGKSALDNGPQIAYVRDFKAKVQYFRFWCQQLAMPQHIKITVTRKTLFEDSFQQIMSFSPQDLRRRLWVIFPGEEGLDYGGVAREWFFLLSHEVLNPMYCLFEYAGKDNYCLQINPASYINPDHLKYFRFIGRFIAMALFHGKFIDTGFSLPFYKRILNKPVGLKDLESIDPEFYNSLIWVKENNIEECDLEMYFSVDKEILGEIKSHDLKPNGGNILVTEENKEEYIRMVAEWRLSRGVEEQTQAFFEGFNEILPQQYLQYFDAKELEVLLCGMQEIDLNDWQRHAIYRHYARTSKQIMWFWQFVKEIDNEKRMRLLQFVTGTCRLPVGGFADLMGSNGPQKFCIEKVGKENWLPRSHTCFNRLDLPPYKSYEQLKEKLLFAIEETEGFGQE

SEQ ID NO: 90 - protein, 431 aa, Homo sapiens
GPPPTRALPLPQSLPPDFRLEPTAPALSPRSSFASSSASDASKPSSPRGSLLLDGAGAGGAGGSRPCSNRTSGISMGYDQRHGSPLPAGPCLFGPPLAGAPAGYSPGGVPSAYPELHAALDRLYAQRPAGFGCQESRHSYPPALGSPGALAGARVGAAGPLERRGAQPGRHSVTGYGDCAVGARYQDELTALLRLTVGTGGREAGARGEPSGIEPSGLEEPPGPFVPEAARARMREPEAREDYFGTCIKCNKGIYGQSNACQALDSLYHTQCFVCCSCGRTLRCKAFYSVNGSVYCEEDYLFSGFQEAAEKCCVCGHLILEKILQAMGKSYHPGCFRCIVCNKCLDGIPFTVDFSNQVYCVTDYHKNYAPKCAACGQPILPSEGCEDIVRVISMDRDYHFECYHCEDCRMQLSDEEGCCCFPLDGHLLCHG

SEQ ID NO: 91 - protein, 900 aa, Homo sapiens
GPGSRHHRARDRLIHFGAVSTDVLGCSAHCSLTQSPKMNIQEQGFPLDLGASFTEDAPRPPVPGEEGELVSTDPRPASYSFCSGKGVGIKGETSTATPRRSDLDLGYEPEGSASPTPPYLKWAESLHSLLDDQDGISLFRTFLKQEGCADLLDFWFACTGFRKLEPCDSNEEKRLKLARAIYRKYILDNNGIVSRQTKPATKSFIKGCIMKQLIDPAMFDQAQTEIQATMEENTYPSFLKSDIYLEYTRTGSESPKVCSDQSSGSGTGKGISGYLPTLNEDEEWKCDQDMDEDDGRDAAPPGRLPQKLLLETAAPRVSSSRRYSEGREFRYGSWREPVNPYYVNAGYALAPATSANDSEQQSLSSDADTLSLTDSSVDGIPPYRIRKQHRREMQESAQVNGRVPLPHIPRTYRVPKEVRVEPQKFAEELIHRLEAVQRTREAEEKLEERLKRVRMEEEGEDGDPSSGPPGPCHKLPPAPAWHHFPPRLCWTWACAGLRDAHEENPESILDEHVQRVLRTTGRQSPGPGHRSPDSGHVAKMPVALGGAASGHGKHVPKSGAKLDAAGLHHHRHVHHHVHHSTARPKEQVEAEATRRAQSSFAWGLEPHSHGARSRGYSESVGAAPNASDGLAHSGKVGVACKRNAKKAESGKSASTEVPGASEDAEKNQKIMQWIIEGEKEISRHRRTGHGSSGTRKPQPHENSRPLSLEHPWAGPQLRTSVQPSHLFIQDPTMPPHPAPNPLTQLEEARRRLEEEEKRASRAPSKQRYVQEVMRRGRACVRPACAPVLHVVPAVSDMELSETETRSQRKVGGGSAQPCDSIVVAYYFCGEPIPYRTLVRGRAVTLGQFKELLTKKGSYRYYFKKVSDEFDCGVVFEEVREDEAVLPVFEEKIIGKVEKVD

SEQ ID NO: 92 - protein, 591 aa, Homo sapiens
MVPVAVTAAVAPVLSINSDFSDLREIKKQLLLIAGLTRERGLLHSSKWSAELAFSLPALPLAELQPPPPITEEDAQDMDAYTLAKAYFDVKEYDRAAHFLHGCNSKKAYFLYMYSRYLSGEKKKDDETVDSLGPLEKGQVKNEALRELRVELSKKHQARELDGFGLYLYGVVLRKLDLVKEAIDVFVEATHVLPLHWGAWLELCNLITDKEMLKFLSLPDTWMKEFFLAHIYTELQLIEEALQKYQNLIDVGFSKSSYIVSQIAVAYHNIRDIDKALSIFNELRKQDPYRIENMDTFSNLLYVRSMKSELSYLAHNLCEIDKYRVETCCVIGNYYSLRSQHEKAALYFQRALKLNPRYLGAWTLMGHEYMEMKNTSAAIQAYRHAIEVNKRDYRAWYGLGQTYEILKMPFYCLYYYRRAHQLRPNDSRMLVALGECYEKLNQLVEAKKCYWRAYAVGDVEKMALVKLAKLHEQLTESEQAAQCYIKYIQDIYSCGEIVEHLEESTAFRYLAQYYFKCKLWDEASTCAQKCCAFNDTREEGKALLRQILQLRNQGETPTTEVPAPFFLPASLSANNTPTRRVSPLNLSSVTP

SEQ ID NO: 93 - protein, 914 aa, Homo sapiens
VYQVLLVGSTLLKEVPSGLQLEQLPSQSLLTHIPTAGLPTSLGGGLPYCHQAWLDFRRRLEALLQNCQAACALLQGAIESVKAVPQPMEPGEVGQLLQQTEVLMQQVLDSPWLAWLQCQGGRELTWLKQEVPEVTLSPDYRTAMDKADELYDRVDGLLHQLTLQSNQRIQALELVQTLEARESGLHQIEVWLQQVGWPALEEAGEPSLDMLLQAQGSFQELYQVAQEQVRQGEKFLQPLTGWEAAELDPPGARFLALRAQLTEFSRALAQRCQRLADAERLFQLFREALTWAEEGQRVLAELEQERPGVVLQQLQLHWTRHPDLPPAHFRKMWALATGLGSEAIRQECRWAWARCQDTWLALDQKLEASLKLPPVGSTASLCVSQVPAAPAHPPLRKAYSFDRNLGQSLSEPACHCHHAATIAACRRPEAGGGALPQASPTVPPPGSSDPRSLNRLQLVLAEMVATEREYVRALEYTMENYFPELDRPDVPQGLRGQRAHLFGNLEKLRDFHCHFFLRELEACTRHPPRVAYAFLRHRVQFGMYALYSKNKPRSDALMSSYGHTFFKDKQQALGDHLDLASYLLKPIQRMGKYALLLQELARACGGPTQELSALREAQSLVHFQLRHGNDLLAMDAIQGCDVNLKEQGQLVRQDEFVVRTGRHKSVRRIFLFEELLLFSKPRHGPTGVDTFAYKRSFKMADLGLTECCGNSNLRFEIWFRRRKARDTFVLQASSLAIKQAWTADISHLLWRQAVHNKEVRMAEMVSMGVGNKAFRDIAPSEEAINDRTVNYVLKCREVRSRASIAVAPFDHDSLYLGASNSLPGDPASCSVLGSLNLHLYRDPALLGLRCPLYPSFLEEAALEAEAELGGQPSLTAEDSEISSQCPSASGSSGSDSSCVSGQALGRGLEDLPCV

SEQ ID NO: 94 - protein, 277 aa, Homo sapiens [sequence omitted]

SEQ ID NO: 95 - protein, 1120 aa, Homo sapiens
MWRVKKLSLSLSPSPQTGKPSMRTPLRELTLQPGALTTSGKRSPACSSLTPSLCKLGLQEGSNNSSPVDFVNNKRTDLSSEHFSHSSKWLETCQHESDEQPLDPIPQISSTPKTSEEAVDPLGNYMVKTIVLVPSPLGQQQDMIFEARLDTMAETNSISLNGPLRTDDLVREEVAPCMGDRFSEVAAVSEKPIFQESPSHLLEESPPNPCSEQLHCSKESLSSRTEAVREDLVPSESNAFLPSSVLWLSPSTALAADFRVNHVDPEEEIVEHGAMEEREMRFPTHPKESETEDQALVSSVEDILSTCLTPNLVEMESQEAPGPAVEDVGRILGSDTESWMSPLAWLEKGVNTSVMLENLRQSLSLPSMLRDAAIGTTPFSTCSVGTWFTPSAPQEKSTNTSQTGLVGTKHSTSETEQLLCGRPPDLTALSRHDLEDNLLSSLVIVEFLSRQLRDWKSQLAVPHPETQDSSTQTDTSHSGITNKLQHLKESHEMGQALQQARNVMQSWVLISKELISLLHLSLLHLEEDKTTVNQESRRAETLVCCCFDLLKKLRAKLQSLKAEREEARHREEMALRGKDAAEIVLEAFCAHASQRISQLEQDLASMREFRGLLKDAQTQLVGLHAKQEELVQQTVSLTSTLQQDWRSMQLDYTTWTALLSRSRQLTEKLTVKSQQALQERDVAIEEKQEVSRVLEQVSAQLEECKGQTEQLELENIRLATDLRAQLQILANMDSQLKELQSQHTHCAQDLAMKDELLCQLTQSNEEQAAQCVKEEMALKHMQAELQQQQAVLAKEVRDLKETLEFADQENQVAHLELGQVECQLKTTLEVLRERSLQCENLKDTVENLTAKLASTIADNQEQDLEKTRQYSQKLGLLTEQLQSLTLFLQTKLKEKTEQETLLLSTACPPTQEHPLPNDRTFLGSILTAVADEEPESTPVPLLGSDKSAFTRVASMVSLQPAETPGMEESLAEMSIMTTELQSLCSLLQESKEEAIRTLQRKICELQARLQAQEEQHQEVQKAKEADIEKLNQALCLRYKNEKELQEVIQQNEKILEQIDKSGELISLREEVTHLTRSLRRAETETKVLQEAWQASWTPTASLWPPIGSRRKCGSLRRWTN

SEQ ID NO: 96 - protein, 540 aa, Homo sapiens
MGTTARAALVLTYLAVASAASEGGFTATGQRQLRPEHFQEVGYAAPPSPPLSRSLPMDHPDSSQHGPPFEGQSQVQPPPSQEATPLQQEKLLPAQLPAEKEVGPPLPQEAVPLQKELPSLQHPNEQKEGTPAPFGDQSHPEPESWNAAQHCQQDRSQGGWGHRLDGFPPGRPSPDNLNQICLPNRQHVVYGPWNLPQSSYSHLTRQGETLNFLEIGYSRCCHCRSHTNRLECAKLVWEEAMSRFCEAEFSVKTRPHWCCTRQGEARFSCFQEEAPQPHYQLRACPSHQPDISSGLELPFPPGVPTLDNIKNICHLRRFRSVPRNLPATDPLQRELLALIQLEREFQRCCRQGNNHTCTWKAWEDTLDKYCDREYAVKTHHHLCCRHPPSPTRDECFARRAPYPNYDRDILTIDISRVTPNLMGHLCGNQRVLTKHKHIPGLIHNMTARCCDLPFPEQACCAEEEKLTFINDLCGPRRNIWRDPALCCYLSPGDEQVNCFNINYLRNVALVSGDTENAKGQGEQGSTGGTNISSTSEPKEE

SEQ ID NO: 97 - protein, 462 aa, Homo sapiens [sequence omitted]

SEQ ID NO: 98 - protein, 2328 aa, Homo sapiens
KSKRQAQQMVQPQSPVAVSQSKPGCYDNGKHYQINQQWERTYLGNVLVCTCYGGSRGFNCESKPEAEETCFDKYTGNTYRVGDTYERPKDSMIWDCTCIGAGRGRISCTIANRCHEGGQSYKIGDTWRRPHETGGYMLECVCLGNGKGEWTCKPIAEKCFDHAAGTSYVVGETWEKPYQGWMMVDCTCLGEGSGRITCTSRNRCNDQDTRTSYRIGDTWSKKDNRGNLLQCICTGNGRGEWKCERHTSVQTTSSGSGPFTDVRAAVYQPQPHPQPPPYGHCVTDSGVVYSVGMQWLKTQGNKQMLCTCLGNGVSCQETAVTQTYGGNLNGEPCVLPFTYNGRTFYSCTTEGRQDGHLWCSTTSNYEQDQKYSFCTDHTVLVQTQGGNSNGALCHFPFLYNNHNYTDCTSEGRRDNMKWCGTTQNYDADQKFGFCPMAAHEEICTTNEGVMYRIGDQWDKQHDMGHMMRCTCVGNGRGEWTCIAYSQLRDQCIVDDITYNVNDTFHKRHEEGHMLNCTCFGQGRGRWKCDPVDQCQDSETGTFYQIGDSWEKYVHGVRYQCYCYGRGIGEWHCQPLQTYPSSSGPVEVFITETPSQPNSHPIQWNAPQPSHISKYILRWRPKNSVGRWKEATIPGHLNSYTIKGLKPGVVYEGQLISIQQYGHQEVTRFDFTTTSTSTPVTSNTVTGETTPFSPLVATSESVTEITASSFVVSWVSASDTVSGFRVEYELSEEGDEPQYLDLPSTATSVNIPDLLPGRKYIVNVYQISEDGEQSLILSTSQTTAPDAPPDPTVDQVDDTSIVVRWSRPQAPITGYRIVYSPSVEGSSTELNLPETANSVTLSDLQPGVQYNITIYAVEENQESTPVVIQQETTGTPRSDTVPSPRDLQFVEVTDVKVTIMWTPPESAVTGYRVDVIPVNLPGEHGQRLPISRNTFAEVTGLSPGVTYYFKVFAVSHGRESKPLTAQQTTKLDAPTNLQFVNETDSTVLVRWTPPRAQITGYRLTVGLTRRGQPRQYNVGPSVSKYPLRNLQPASEYTVSLVAIKGNQESPKATGVFTTLQPGSSIPPYNTEVTETTIVITWTPAPRIGFKLGVRPSQGGEAPREVTSDSGSIVVSGLTPGVEYVYTIQVLRDGQERDAPIVNKVVTPLSPPTNLHLEANPDTGVLTVSWERSTTPDITGYRITTTPTNGQQGNSLEEVVHADQSSCTFDNLSPGLEYNVSVYTVKDDKESVPISDTIIPAVPPPTDLRFTNIGPDTMRVTWAPPPSIDLTNFLVRYSPVKNEEDVAELSISPSDNAVVLTNLLPGTEYVVSVSSVYEQHESTPLRGRQKTGLDSPTGIDFSDITANSFTVHWIAPRATITGYRIRHHPEHFSGRPREDRVPHSRNSITLTNLTPGTEYVVSIVALNGREESPLLIGQQSTVSDVPRDLEVVAATPTSLLISWDAPAVTVRYYRITYGETGGNSPVQEFTVPGSKSTATISGLKPGVDYTITVYAVTGRGDSPASSKPISINYRTEIDKPSQMQVTDVQDNSISVKWLPSSSPVTGYRVTTTPKNGPGPTKTKTAGPDQTEMTIEGLQPTVEYVVSVYAQNPSGESQPLVQTAVTNIDRPKGLAFTDVDVDSIKIAWESPQGQVSRYRVTYSSPEDGIHELFPAPDGEEDTAELQGLRPGSEYTVSVVALHDDMESQPLIGTQSTAIPAPTDLKFTQVTPTSLSAQWTPPNVQLTGYRVRVTPKEKTGPMKEINLAPDSSSVVVSGLMVATKYEVSVYALKDTLTSRPAQGVVTTLENVSPPRRARVTDATETTITISWRTKTETITGFQVDAVPANGQTPIQRTIKPDVRSYTITGLQPGTDYKIYLYTLNDNARSSPVVIDASTAIDAPSNLRFLATTPNSLLVSWQPPRARITGYIIKYEKPGSPPREVVPRPRPGVTEATITGLEPGTEYTIYVIALKNNQKSEPLIGRKKTDELPQLVTLPHPNLHGPEILDVPSTVQKTPFVTHPGYDTGNGIQLPGTSGQQPSVGQQMIFEEHGFRRTTPPTTATPIRHRPRPYPPNVGQEALSQTTISWAPFQDTSEYIISCHPVGTDEEPLQFRVPGTSTSATLTGLTRGATYNIIVEALKDQQRHKVREEVVTVGNSVNEGLNQPTDDSCFDPYTVSHYAVGDEWERMSESGFKLLCQCLGFGSGHFRCDSSRWCHDNGVNYKIGEKWDRQGENGQMMSCTCLGNGKGEFKCDPHEATCYDDGKTYHVGEQWQKEYLGAICSCTCFGGQRGWRCDNCRRPGGEPSPEGTTGQSYNQYSQRYHQRTNTNVNCPIECFMPLDVQADREDSRE

SEQ ID NO: 99 - protein, 188 aa, Homo sapiens
HQTHKEGGSTHASADAWEIIELETEIEKFKAENASLAKLRIERESALEKLRKEIADFEQQKAKELARIEEFKKEEMRKLQKERKVFEKYTTAARTFPDKKEREEIQTLKQQIADLREDLKRKETKWSSTHSRLRSQIQMLVRENTDLREEIKVMERFRLDAWKRAEAIESSLEVEKKDKLANTSVRFQ

SEQ ID NO: 100 - protein, 284 aa, Homo sapiens
MEPGNYATLDGAKDIEGLLGAGGGRNLVAHSPLTSHPAAPTLMPAVNYAPLDLPGSAEPPKQCHPCPGVPQGTSPAPVPYGYFGGGYYSCRVSRSSLKPCAQAATLAAYPAETPTAGEEYPSRPTEFAFYPGYPGTYHAMASYLDVSVVQTLGAPGEPRHDSLLPVDSYQSWALAGGWNSQMCCQGEQNPPGPFWKAAFADSSGQHPPDACAFRRGRKKRIPYSKGQLRELEREYAANKFITKDKRRKISAATSLSERQITIWFQNRRVKEKKVLAKVKNSATP

SEQ ID NO: 101 - protein, 676 aa, Homo sapiens
MDKYDDLGLEASKFIEDLNMYEASKDGLFRVDKGAGNNPEFEETRRVFATKMAKIHLQQQQQQLLQEETLPRGSRGPVNGGGRLGPQARWEVVGSKLTVDGAAKPPLAASTGAPGAVTTLAAGQPPYPPQEQRSRPYLHGTRHGSQDCGSRESLATSEMSAFHQPGPCEDPSCLTHGDYYDNLSLASPKWGDKPGVSPSIGLSVGSGWPSSPGSDPPLPKPCGDHPLNHRQLSLSSSRSSEGSLGGQNSGIGGRSSEKPTGLWSTASSQRVSPGLPSPNLENGAPAVGPVQPRTPSVSAPLALSCPRQGGLPRSNSGLGGEVSGVMSKPNVDPQPWFQDGPKSYLSSSAPSSSPAGLDGSQQGAVPGLGPKPGCTDLGTGPKLSPTSLVHPVMSTLPELSCKEGPLGWSSDGSLGSVLLDSPSSPRVRLPCQPLVPGPELRPSAAELKLEALTQRLEREMDAHPKADYFGACVKCSKGVFGAGQACQAMGNLYHDTCFTCAACSRKLRGKAFYFVNGKVFCEEDFLYSGFQQSADRCFLCGHLIMDMILQALGKSYHPGCFRCVICNECLDGVPFTVDSENKIYCVRDYHKVLAPKCAACGLPILPPEGSDETIRVVSMDRDYHVECYHCEDCGLELNDEDGHRCYPLEDHLFCHSCHVKRLEKRPSSTALHQHHF

SEQ ID NO: 102 - protein, 296 aa, Homo sapiens
STGSEFPLCTKASPCSAARAGGRALGWRLQQQRETRGNPGNPGLGVAATMTGSNMSDALANAVCQRCQARFSPAERIVNSNGELYHEHCFVCAQCFRPFPEGLFYEFEGRKYCEHDFQMLFAPCCGSCGEFIIGRVIKAMNNNWHPGCFRCELCDVELADLGFVKNAGRHLCRPCHNREKAKGLGKYICQRCHLVIDEQPLMFRSDAYHPDHFNCTHCGKELTAEARELKGELYCLPCHDKMGVPICGACRRPIEGRVVNALGKQWHVEHFVCAKCEKPFLGHRHYEKKGLAYCEL

SEQ ID NO: 103 - protein, 500 aa, Homo sapiens
MGIGLSAQGVNMNRLPGWDKHSYGYHGDDGHSFCSSGTGQPYGPTFTTGDVIGCCVNLINNTCFYTKNGHSLGIAFTDLPPNLYPTVGLQTPGEVVDANFGQHPFVFDIEDYMREWRTKIQAQIDRFPIGDREGEWQTMIQKMVSSYLVHHGYCATAEAFARSTDQTVLEELASIKNRQRIQKLVLAGRMGEAIETTQQLYPSLLERNPNLLFTLKVRQFIEMVNGTDSEVRCLGGRSPKSQDSYPVSPRPFSSPSMSPSHGMNIHNLASGKGSTAHFSGFESCSNGVISNKAHQSYCHSNKHQSSNLNVPELNSINMSRSQQVNNFTSNDVDMETDHYSNGVGETSSNGFLNGSSKHDHEMEDCDTEMEVDSSQLRRQLCGGSQAAIERMIHFGRELQAMSEQLRRDCGKNTANKKMLKDAFSLLAYSDPWNSPVGNQLDPIQREPVCSALNSAILETHNLPKQPPLALAMGQATQCLGLMARSGIGSCAFATVEDYLH

SEQ ID NO: 104 - protein, 387 aa, Homo sapiens
MATSGVLPGGGFVASAAAVAGPEMQTGRNNFVIRRNPADPQRIPSNPSHRIQCAAGYEQSEHNVCQDIDECTAGTHNCRADQVCINLRGSFACQCPPGYQKRGEQCVDIDECTIPPYCHQRCVNTPGSFYCQCSPGFQLAANNYTCVDINECDASNQCAQQCYNILGSFICQCNQGYELSSDRLNCEDIDECRTSSYLCQYQCVNEPGKFSCMCPQGYQVVRSRTCQDINECETTNECREDEMCWNYHGGFRCYPRNPCQDPYILTPENRCVCPVSNAMCRELPQSIVYKYMSIRSDRSVPSDIFQIQATTIYANTINTFRIKSGNENGEFYLRQTSPVSAMLVLVKSLSGPREHIVDLEMLTVSSIGTFRTSSVLRLTIIVGPFSF

SEQ ID NO: 105 - protein, 531 aa, Homo sapiens [sequence omitted]

SEQ ID NO: 106 - protein, 480 aa, Homo sapiens
MAARCSTRWLLVVVGTPRLPAISGRGARPPREGVVGAWLSRKLSVPAFASSLTSCGPRALLTLRPGVSLTGTKHNPFICTASFHTSAPLAKEDYYQILGVPRNASQKEIKKAYYQLAKKYHPDTNKDDPKAKEKFSQLAEAYEVLSDEVKRKQYDAYGSAGFDPGASGSQHSYWKGGPTVDPEELFRKIFGEFSSSSFGDFQTVFDQPQEYFMELTFNQAAKGVNKEFTVNIMDTCERCNGKGNEPGTKVQHCHYCGGSGMETINTGPFVMRSTCRRCGGRGSIIISPCVVCRGAGQAKQKKRVMIPVPAGVEDGQTVRMPVGKREIFITFRVQKSPVFRRDGADIHSDLFISIAQALLGGTARAQGLYETINVTIPPGTQTDQKIRMGGKGIPRINSYGYGDHYIHIKIRVPKRLTSRQQSLILSYAEDETDVEGTVNGVTLTSSGGSTMDSSAGSKARREAGEDEEGFLSKLKKMFTS

SEQ ID NO: 107 - protein, 572 aa, Homo sapiens
MAAPRPSPAISVSVSAPAFYAPQKKFGPVVAPKPKVNPFRPGDSEPPPAPGAQRAQMGRVGEIPPPPPEDFPLPPPPLAGDGDDAEGALGGAFPPPPPPIEESFPPAPLEEEIFPSPPPPPEEEGGPEAPIPPPPQPREKVSSIDLEIDSLSSLLDDMTKNDPFKARVSSGYVPPPVATPFSSKSSTKPAAGGTAPLPPWKSPSSSQPLPQVPAPAQSQTQFHVQPQPQPKPQVQLHVQSQTQPVSLANTQPRGPPASSPAPAPKFSPVTPKFTPVASKFSPGAPGGSGSQPNQKLGHPEALSAGTGSPQPPSFTYAQQREKPRVQEKQHPVPPPAQNQNQVRSPGAPGPLTLKEVEELEQLTQQLMQDMEHPQRQNVAVNELCGRCHQPLARAQPAVRALGQLFHIACFTCHQCAQQLQGQQFYSLEGAPYCEGCYTDTLEKCNTCGEPITDRMLRATGKAYHPHCFTCVVCARPLEGTSFIVDQANRPHCVPDYHKQYAPRCSVCSEPIMPEPGRDETVRVVALDKNFHMKCYKCEDCGKPLSIEADDNGCFPLDGHVLCRKCHTARAQT

SEQ ID NO: 108 - protein, 2861 aa, Homo sapiens
MKAMDVLPILKEKVAYLSGGRDKRGGPILTFPARSNHDRIRQEDLRRLISYLACIPSEEVCKRGFTVIVDMRGSKWDSIKPLLKILQESFPCCIHVALIIKPDNFWQKQRTNFGSSKFEFETNMVSLEGLTKVVDPSQLTPEFDGCLEYNHEEWIEIRVAFEDYISNATHMLSRLEELQDILAKKELPQDLEGARNMIEEHSQLKKKVIKAPIEDLDLEGQKLLQRIQSSESFPKKNSGSGNADLQNLLPKVSTMLDRLHSTRQHLHQMWHVRKLKLDQCFQLRLFEQDAEKMFDWITHNKGLFLNSYTEIGTSHPHAMELQTQHNHFAMNCMNVYVNINRIMSVANRLVESGHYASQQIRQIASQLEQEWKAFAAALDERSTLLDMSSIFHQKAEKYMSNVDSWCKACGEVDLPSELQDLEDAIHHHQGIYEHITLAYSEVSQDGKSLLDKLQRPLTPGSSDSLTASANYSKAVHHVLDVIHEVLHHQRHVRTIWQHRKVRLHQRLQLCVFQQEVQQVLDWIENHGEAFLSKHTGVGKSLHRARALQKRHEDFEEVAQNTYTNADKLLEAAEQLAQTGECDPEEIYQAAHQLEDRIQDFVRRVEQRKILLDMSVSFHTHVKELWTWLEELQKELLDDVYAESVEAVQDLIKRFGQQQQTTLQVTVNVIKEGEDLIQQLRDSAISSNKTPHNSSINHIETVLQQLDEAQSQMEELFQERKIKLELFLHVRIFERDAIDIISDLESWNDELSQQMNDFDTEDLTIAEQRLQHHADKALTMNNLTFDVIHQGQDLLQYVNEVQASGVELLCDRDVDMATRVQDLLEFLHEKQQELDLAAEQHRKHLEQCVQLRHLQAEVKQVLGWIRNGESMLNAGLITASSLQEAEQLQREHEQFQHAIEKTHQSALQVQQKAEAMLQANHYDMDMIRDCAEKVASHWQQLMLKMEDRLKLVNASVAFYKTSEQVCSVLESLEQEYKREEDWCGGADKLGPNSETDHVTPMISKHLEQKEAFLKACTLARRNADVFLKYLHRNSVNMPGMVTHIKAPEQQVKNILNELFQRENRVLHYWTMRKRRLDQCQQYVVFERSAKQALEWIHDNGEFYLSTHTSTGSSIQHTQELLKEHEEFQITAKQTKERVKLLIQLADGFCEKGHAHAAEIKKCVTAVDKRYRDFSLRMEKYRTSLEKALGISSDSNKSSKSLQLDIIPASIPGSEVKLRDAAHELNEEKRKSARRKEFIMAELIQTEKAYVRDLRECMDTYLWEMTSGVEEIPPGIVNKELIIFGNMQEIYEFHNNIFLKELEKYEQLPEDVGHCFVTWADKFQMYVTYCKNKPDSTQLILEHAGSYFDEIQQRHGLANSISSYLIKPVQRITKYQLLLKELLTCCEEGKGEIKDGLEVMLSVPKRANDAMHLSMLEGFDENIESQGELILQESFQVWDPKTLIRKGRERHLFLFEMSLVFSKEVKDSSGRSKYLYKSKLFTSELGVTEHVEGDPCKFALWVGRTPTSDNKIVLKASSIENKQDWIKHIREVIQERTIHLKGALKEPIHIPKTAPATRQKGRRDGEDLDSQGDGSSQPDTISIASRTSQNTLDSDKLSGGCELTVVIHDFTACNSNELTIRRGQTVEVLERPHDKPDWCLVRTTDRSPAAEGLVPCGSLCIAHSRSSMEMEGIFNHKDSLSVSSNDASPPASVASLQPHMIGAQSSPGPKRPGNTLRKWLTSPVRRLSSGKADGHVKKLAHKHKKSREVRKSADAGSQKDSDDSAATPQDETVEERGRNEGLSSGTLSKSSSSGMQSCGEEEGEEGADAVPLPPPMAIQQHSLLQPDSQDDKASSRLLVRPTSSETPSAAELVSAIEELVKSKMALEDRPSSLLVDQGDSSSPSFNPSDNSLLSSSSPIDEMEERKSSSLKRRHYVLQELVETERDYVRDLGYVVEGYMALMKEDGVPDDMKGKDKIVFGNIHQIYDWHRDFFLGELEKCLEDPEKLGSLFVKHERRLHMYIAYCQNKPKSEHIVSEYIDTFFEDLKQRLGHRLQLTDLLIKPVQRIMKYQLLLKDFLKYSKKASLDTSELERAVEVMCIVPRRCNDMMNVGRLQGFDGKIVAQGKLLLQDTFLVTDQDAGLLPRCRERRIFLFEQIVIFSEPLDKKKGFSMPGFLFKNSIKVSCLCLEENVENDPCKFALTSRTGDVVETFILHSSSPSVRQTWIHEINQILENQRNFLNALTSPIEYQRNHSGGGGGGGSGAAAGVGAAAAAGPPVAAAATVAAPAAAAAPPARAGAGPPGSPSLSDTTPPCWSPLQPRARQRQTRCQSESSSSSNISTMLVTHDYTAVKEDEINVYQGEVVQILASNQQNMFLVFRAATDQCPAAEGWIPGFVLGHTSAVIVENPDGTLKKSTSWHTALRLRKKSEKKDKDGKREGKLENGYRKSREGLSNKVSVKLLNPNYIYDVPPEFVIPLSEVTCETGETVVLRCRVCGRPKASITWKGPEHNTLNNDGHYSISYSDLGEATLKIVGVTTEDDGIYTCIAVNDMGSASSSASLRVLGPGMDGIMVTWKDNFDSFYSEVAELGRGRFSVVKKCDQKGTKRAVATKFVNKKLMKRDQVTHELGILQSLQHPLLVGLLDTFETPTSYILVLEMADQGRLLDCVVRWGSLTEGKIRAHLGEVLEAVRYLHNCRIAHLDLKPENILVDESLAKPTIKLADFGDAVQLNTTYYIHQLLGNPEFAAPEIILGNPVSLTSDTWSVGVLTYVLLSGVSPFLDDSVEETCLNICRLDFSFPDDYFKGVSQKAKEFVCFLLQEDPAKRPSAALALQEQWLQAGNGRSTGVLDTSRLTSFIERRKHQNDVRPIRSIKNFLQSRLLPRV

SEQ ID NO: 109 - protein, 271 aa, Homo sapiens
MVLIKEFRVVLPCSVQEYQVGQLYSVAEASKNETGGGEGIEVLKNEPYEKDGEKGQYTHKIYHLKSKVPAFVRMIAPEGSLVFHEKAWNAYPYCRTIVTNEYMKDDFFIKIETWHKPDLGTLENVHGLDPNTWKTVEIVHIDIADRSQVEPADYKADEDPALFQSVKTKRGPLGPNWKKELANSPDCPQMCAYKLVTIKFKWWGLQSKVENFIQKQEKRIFTNFHRQLFCWIDKWIDLTMEDIRRMEDETQKELETMRKRGSVRGTSAADV
